United States Patent Application Publication US 2021/0361761 A1 - sequence listing, part 2

SEQ ID NO: 1247 - RNA, 2263 nt, Artificial Sequence
  mRNA product Design i-3 comprising derived and/or modified sequence from YFV__NC_002031.1__SSjev-prME (polyprotein: aa122-778) (opt11)
gggagaaagcuuaccauggggaaaaggagcgcgggcucgauaaugugguuggccucgcucgcggucgugaucgcgugcgcgggcgcggugacccuaguccgcaaaaacagauggcuacuacuaaacguaacaagcgaagaccugggcaaaacauucagcguuggcacaggcaauugcacgacaaacauacucgaagcaaaauacuggugccccgacagcauggaauacaacugcccaaaucuaagcccacgcgaagaaccagacgacaucgacuguuggugcuacggagucgaaaacgugagggucgcauacgguaaaugcgacagcgcuggcagaagcagacgcucccgacgagccauugaccucccuacccacgaaaaccacggccuaaaaacccggcaggaaaaauggaugacaggccggaugggagaacgccaacuacagaaaauagagaggugguuuguaagaaacccauucuucgccguaaccgcgcucaccaucgcuuaccucguaggaucaaacaugacgcaaagaguagugaucgcgcuacucguacuagcgguaggccccgccuacagcgcacacugcaucggcaucacugacagggacuucauagaaggcguccacgggggcacguggguuagcgccacacucgaacaagacaaaugcgucacagugauggcaccagacaaacccucacuagacaucucacuagaaaccgucgcaaucgaccgcccagcagaagucaggaaagugugcuacaacgccgucuuaacccacguaaaaauaaaugauaaaugcccaagcacgggagaggcacaccuagcggaagaaaacgaaggcgacaacgcgugcaaacguaccuacagcgacagaggguggggcaacggaugcggcuuauucggaaaaggaaguaucguagcaugcgcaaaauuuaccugcgccaaaagcaugucccuauucgaaguagaucaaacaaaaauacaauacgucauccgagcccaacuacacgugggggcaaaacaagaaaacuggaacaccgacaucaaaacacucaaauucgaugcccuaagcggcucccaagaaguagaguucaucgguuacggcaaggccacgcucgagugccaaguccaaacagcaguagacuucgggaacucauacaucgccgagauggaaacggaaucauggauugucgacagacaaugggcacaagaccuaacacuaccauggcaaucaggcagcggaggggucuggcgagaaaugcaccaccuaguagaguucgaacccccacacgccgcaacaauccgaguacuagcccucggaaaccaagaaggaucacuaaaaaccgcacucaccggcgcaaugcgcguaacaaaagauacaaacgacaacaaccuauacaaacuacacggcggacacgucagcugccgcgucaaacuauccgcccuaacacuaaaaggaacaagcuacaaaauaugcacagacaaaauguucuucgucaaaaauccgacugacacgggccacggcacagucguaaugcaaguaaaagucucaaaaggcgcaccaugcagaaucccaguaaucgucgccgaugaccuaacagccgcaaucaacaagggcauccucguaacaguaaaccccauagccagcaccaacgacgacgaaguccuaaucgaagucaacccacccuucggagacagcuacauaauaguaggacgaggggacucacgccuaaccuaccaauggcacaaagaaggauccucaaucggcaaacuguucacacaaacgaugaaaggcguagaaagacucgcaguaaugggcgauacggccugggacuucucaagcgcgggcggcuucuucacgagcgucggaaaaggcauccauacaguauucggaagcgcauuccaaggccuauuuggaggccucaacuggauaacaaaagugaucaugggagcaguacugaucugggucggcaucaacacccgcaacaugacgaugagcaugucaaugauccucgugggaguaauaaugauguuccucagccugggcguaggcgcaugaggacuaguuauaagacugacuagcccgaugggccucccaacgggcccuccuccccuccuugcaccgagauuaauaaaaaaaaaaaaaaaaaaaaaaaaaaaaaaaaaaaaaaaaaaaaaaaaaaaaaaaaaaaaaaaaugcaucccccccccccccccccccccccccccccccaaaggcucuuuucagagccaccagaauu

SEQ ID NO: 1248 - RNA, 2416 nt, Artificial Sequence
  mRNA product Design a-4 comprising derived and/or modified sequence from YFV__NC_002031.1__X-SS-prME-XX (polyprotein: aa92-788) (wt)
gggagacuccugucgggcggaaguaggaggaguagaguuuaaaaacaguacucuuuuuccgguucgggacguaguugaagcaacgacaagccggauaaccgcucuugagacaggaagcuuaccaugagaggauuguccucaaggaaacgccguucccaugauguucugacugugcaauuccuaauuuugggaaugcuguugaugacggguggagugaccuuggugcggaaaaacagaugguugcuccuaaaugugacaucugaggaccucgggaaaacauucucugugggcacaggcaacugcacaacaaacauuuuggaagccaaguacuggugcccagacucaauggaauacaacugucccaaucucaguccaagagaggagccagaugacauugauugcuggugcuaugggguggaaaacguuagagucgcauaugguaagugugacucagcaggcaggucuaggaggucaagaagggccauugacuugccuacgcaugaaaaccaugguuugaagacccggcaagaaaaauggaugacuggaagaaugggugaaaggcaacuccaaaagauugagagaugguucgugaggaaccccuuuuuugcagugacggcucugaccauugccuaccuugugggaagcaacaugacgcaacgagucgugauugcccuacuggucuuggcuguugguccggccuacucagcucacugcauuggaauuacugacagggauuucauugagggggugcauggaggaacuuggguuucagcuacccuggagcaagacaagugugucacuguuauggccccugacaagccuucauuggacaucucacuagagacaguagccauugauagaccugcugaggugaggaaaguguguuacaaugcaguucucacucaugugaagauuaaugacaagugccccagcacuggagaggcccaccuagcugaagagaacgaaggggacaaugcgugcaagcgcacuuauucugauagaggcuggggcaauggcuguggccuauuugggaaagggagcauuguggcaugcgccaaauucacuugugccaaauccaugaguuuguuugagguugaucagaccaaaauucaguaugucaucagagcacaauugcauguaggggccaagcaggaaaauuggaauaccgacauuaagacucucaaguuugaugcccugucaggcucccaggaagucgaguucauuggguauggaaaagcuacacuggaaugccaggugcaaacugcgguggacuuugguaacaguuacaucgcugagauggaaacagagagcuggauaguggacagacagugggcccaggacuugacccugccauggcagaguggaaguggcgggguguggagagagaugcaucaucuugucgaauuugaaccuccgcaugccgccacuaucagaguacuggcccugggaaaccaggaaggcuccuugaaaacagcucuuacuggcgcaaugaggguuacaaaggacacaaaugacaacaaccuuuacaaacuacaugguggacauguuucuugcagagugaaauugucagcuuugacacucaaggggacauccuacaaaauaugcacugacaaaauguuuuuugucaagaacccaacugacacuggccauggcacuguugugaugcaggugaaagugucaaaaggagcccccugcaggauuccagugauaguagcugaugaucuuacagcggcaaucaauaaaggcauuuugguuacaguuaaccccaucgccucaaccaaugaugaugaagugcugauugaggugaacccaccuuuuggagacagcuacauuaucguugggagaggagauucacgucucacuuaccaguggcacaaagagggaagcucaauaggaaaguuguucacucagaccaugaaaggcguggaacgccuggccgucaugggagacaccgccugggauuucagcuccgcuggaggguucuucacuucgguugggaaaggaauccauacgguguuuggcucugccuuucaggggcuauuuggcggcuugaacuggauaacaaaggucaucaugggggcgguacuuauauggguuggcaucaacacaagaaacaugacaauguccaugagcaugaucuugguaggagugaucaugauguuuuugucucuaggaguuggggcggaucaaggaugcgccaucaacuuuggcaaguaaggacuagucccuguucccagagcccacuuuuuuuucuuuuuuugaaauaaaauagccugucuuucagaucuaaaaaaaaaaaaaaaaaaaaaaaaaaaaaaaaaaaaaaaaaaaaaaaaaaaaaaaaaaaaaaaaugcaucccccccccccccccccccccccccccccccaaaggcucuuuucagagccaccagaauu

SEQ ID NO: 1249 - RNA, 2383 nt, Artificial Sequence
  mRNA product Design a-4 comprising derived and/or modified sequence from YFV__NC_002031.1__SS-prME (polyprotein: M,aa104-778) (wt)
gggagacuccugucgggcggaaguaggaggaguagaguuuaaaaacaguacucuuuuuccgguucgggacguaguugaagcaacgacaagccggauaaccgcucuugagacaggaagcuuaccauggauguucugacugugcaauuccuaauuuugggaaugcuguugaugacggguggagugaccuuggugcggaaaaacagaugguugcuccuaaaugugacaucugaggaccucgggaaaacauucucugugggcacaggcaacugcacaacaaacauuuuggaagccaaguacuggugcccagacucaauggaauacaacugucccaaucucaguccaagagaggagccagaugacauugauugcuggugcuaugggguggaaaacguuagagucgcauaugguaagugugacucagcaggcaggucuaggaggucaagaagggccauugacuugccuacgcaugaaaaccaugguuugaagacccggcaagaaaaauggaugacuggaagaaugggugaaaggcaacuccaaaagauugagagaugguucgugaggaaccccuuuuuugcagugacggcucugaccauugccuaccuugugggaagcaacaugacgcaacgagucgugauugcccuacuggucuuggcuguugguccggccuacucagcucacugcauuggaauuacugacagggauuucauugagggggugcauggaggaacuuggguuucagcuacccuggagcaagacaagugugucacuguuauggccccugacaagccuucauuggacaucucacuagagacaguagccauugauagaccugcugaggugaggaaaguguguuacaaugcaguucucacucaugugaagauuaaugacaagugccccagcacuggagaggcccaccuagcugaagagaacgaaggggacaaugcgugcaagcgcacuuauucugauagaggcuggggcaauggcuguggccuauuugggaaagggagcauuguggcaugcgccaaauucacuugugccaaauccaugaguuuguuugagguugaucagaccaaaauucaguaugucaucagagcacaauugcauguaggggccaagcaggaaaauuggaauaccgacauuaagacucucaaguuugaugcccugucaggcucccaggaagucgaguucauuggguauggaaaagcuacacuggaaugccaggugcaaacugcgguggacuuugguaacaguuacaucgcugagauggaaacagagagcuggauaguggacagacagugggcccaggacuugacccugccauggcagaguggaaguggcgggguguggagagagaugcaucaucuugucgaauuugaaccuccgcaugccgccacuaucagaguacuggcccugggaaaccaggaaggcuccuugaaaacagcucuuacuggcgcaaugaggguuacaaaggacacaaaugacaacaaccuuuacaaacuacaugguggacauguuucuugcagagugaaauugucagcuuugacacucaaggggacauccuacaaaauaugcacugacaaaauguuuuuugucaagaacccaacugacacuggccauggcacuguugugaugcaggugaaagugucaaaaggagcccccugcaggauuccagugauaguagcugaugaucuuacagcggcaaucaauaaaggcauuuugguuacaguuaaccccaucgccucaaccaaugaugaugaagugcugauugaggugaacccaccuuuuggagacagcuacauuaucguugggagaggagauucacgucucacuuaccaguggcacaaagagggaagcucaauaggaaaguuguucacucagaccaugaaaggcguggaacgccuggccgucaugggagacaccgccugggauuucagcuccgcuggaggguucuucacuucgguugggaaaggaauccauacgguguuuggcucugccuuucaggggcuauuuggcggcuugaacuggauaacaaaggucaucaugggggcgguacuuauauggguuggcaucaacacaagaaacaugacaauguccaugagcaugaucuugguaggagugaucaugauguuuuugucucuaggaguuggggcggaucaaggaugcgccaucaacuuuggcaaguaaggacuagucccuguucccagagcccacuuuuuuuucuuuuuuugaaauaaaauagccugucuuucagaucuaaaaaaaaaaaaaaaaaaaaaaaaaaaaaaaaaaaaaaaaaaaaaaaaaaaaaaaaaaaaaaaaugcaucccccccccccccccccccccccccccccccaaaggcucuuuucagagccaccagaauu

SEQ ID NO: 1250 - RNA, 2380 nt, Artificial Sequence
  mRNA product Design a-4 comprising derived and/or modified sequence from YFV__NC_002031.1__SSIgE-prME-XX (polyprotein: aa122-788) (wt)
gggagacuccugucgggcggaaguaggaggaguagaguuuaaaaacaguacucuuuuuccgguucgggacguaguugaagcaacgacaagccggauaaccgcucuugagacaggaagcuuaccauggacuggaccuggauccuguuccucguggccgccgcgacccgcguccacagcgugaccuuggugcggaaaaacagaugguugcuccuaaaugugacaucugaggaccucgggaaaacauucucugugggcacaggcaacugcacaacaaacauuuuggaagccaaguacuggugcccagacucaauggaauacaacugucccaaucucaguccaagagaggagccagaugacauugauugcuggugcuaugggguggaaaacguuagagucgcauaugguaagugugacucagcaggcaggucuaggaggucaagaagggccauugacuugccuacgcaugaaaaccaugguuugaagacccggcaagaaaaauggaugacuggaagaaugggugaaaggcaacuccaaaagauugagagaugguucgugaggaaccccuuuuuugcagugacggcucugaccauugccuaccuugugggaagcaacaugacgcaacgagucgugauugcccuacuggucuuggcuguugguccggccuacucagcucacugcauuggaauuacugacagggauuucauugagggggugcauggaggaacuuggguuucagcuacccuggagcaagacaagugugucacuguuauggccccugacaagccuucauuggacaucucacuagagacaguagccauugauagaccugcugaggugaggaaaguguguuacaaugcaguucucacucaugugaagauuaaugacaagugccccagcacuggagaggcccaccuagcugaagagaacgaaggggacaaugcgugcaagcgcacuuauucugauagaggcuggggcaauggcuguggccuauuugggaaagggagcauuguggcaugcgccaaauucacuugugccaaauccaugaguuuguuugagguugaucagaccaaaauucaguaugucaucagagcacaauugcauguaggggccaagcaggaaaauuggaauaccgacauuaagacucucaaguuugaugcccugucaggcucccaggaagucgaguucauuggguauggaaaagcuacacuggaaugccaggugcaaacugcgguggacuuugguaacaguuacaucgcugagauggaaacagagagcuggauaguggacagacagugggcccaggacuugacccugccauggcagaguggaaguggcgggguguggagagagaugcaucaucuugucgaauuugaaccuccgcaugccgccacuaucagaguacuggcccugggaaaccaggaaggcuccuugaaaacagcucuuacuggcgcaaugaggguuacaaaggacacaaaugacaacaaccuuuacaaacuacaugguggacauguuucuugcagagugaaauugucagcuuugacacucaaggggacauccuacaaaauaugcacugacaaaauguuuuuugucaagaacccaacugacacuggccauggcacuguugugaugcaggugaaagugucaaaaggagcccccugcaggauuccagugauaguagcugaugaucuuacagcggcaaucaauaaaggcauuuugguuacaguuaaccccaucgccucaaccaaugaugaugaagugcugauugaggugaacccaccuuuuggagacagcuacauuaucguugggagaggagauucacgucucacuuaccaguggcacaaagagggaagcucaauaggaaaguuguucacucagaccaugaaaggcguggaacgccuggccgucaugggagacaccgccugggauuucagcuccgcuggaggguucuucacuucgguugggaaaggaauccauacgguguuuggcucugccuuucaggggcuauuuggcggcuugaacuggauaacaaaggucaucaugggggcgguacuuauauggguuggcaucaacacaagaaacaugacaauguccaugagcaugaucuugguaggagugaucaugauguuuuugucucuaggaguuggggcggaucaaggaugcgccaucaacuuuggcaaguaaggacuagucccuguucccagagcccacuuuuuuuucuuuuuuugaaauaaaauagccugucuuucagaucuaaaaaaaaaaaaaaaaaaaaaaaaaaaaaaaaaaaaaaaaaaaaaaaaaaaaaaaaaaaaaaaaugcaucccccccccccccccccccccccccccccccaaaggcucuuuucagagccaccagaauu

SEQ ID NO: 1251 - RNA, 2350 nt, Artificial Sequence
  mRNA product Design a-4 comprising derived and/or modified sequence from YFV__NC_002031.1__SSIgE-prME (polyprotein: aa122-778) (wt)
gggagacuccugucgggcggaaguaggaggaguagaguuuaaaaacaguacucuuuuuccgguucgggacguaguugaagcaacgacaagccggauaaccgcucuugagacaggaagcuuaccauggacuggaccuggauccuguuccucguggccgccgcgacccgcguccacagcgugaccuuggugcggaaaaacagaugguugcuccuaaaugugacaucugaggaccucgggaaaacauucucugugggcacaggcaacugcacaacaaacauuuuggaagccaaguacuggugcccagacucaauggaauacaacugucccaaucucaguccaagagaggagccagaugacauugauugcuggugcuaugggguggaaaacguuagagucgcauaugguaagugugacucagcaggcaggucuaggaggucaagaagggccauugacuugccuacgcaugaaaaccaugguuugaagacccggcaagaaaaauggaugacuggaagaaugggugaaaggcaacuccaaaagauugagagaugguucgugaggaaccccuuuuuugcagugacggcucugaccauugccuaccuugugggaagcaacaugacgcaacgagucgugauugcccuacuggucuuggcuguugguccggccuacucagcucacugcauuggaauuacugacagggauuucauugagggggugcauggaggaacuuggguuucagcuacccuggagcaagacaagugugucacuguuauggccccugacaagccuucauuggacaucucacuagagacaguagccauugauagaccugcugaggugaggaaaguguguuacaaugcaguucucacucaugugaagauuaaugacaagugccccagcacuggagaggcccaccuagcugaagagaacgaaggggacaaugcgugcaagcgcacuuauucugauagaggcuggggcaauggcuguggccuauuugggaaagggagcauuguggcaugcgccaaauucacuugugccaaauccaugaguuuguuugagguugaucagaccaaaauucaguaugucaucagagcacaauugcauguaggggccaagcaggaaaauuggaauaccgacauuaagacucucaaguuugaugcccugucaggcucccaggaagucgaguucauuggguauggaaaagcuacacuggaaugccaggugcaaacugcgguggacuuugguaacaguuacaucgcugagauggaaacagagagcuggauaguggacagacagugggcccaggacuugacccugccauggcagaguggaaguggcgggguguggagagagaugcaucaucuugucgaauuugaaccuccgcaugccgccacuaucagaguacuggcccugggaaaccaggaaggcuccuugaaaacagcucuuacuggcgcaaugaggguuacaaaggacacaaaugacaacaaccuuuacaaacuacaugguggacauguuucuugcagagugaaauugucagcuuugacacucaaggggacauccuacaaaauaugcacugacaaaauguuuuuugucaagaacccaacugacacuggccauggcacuguugugaugcaggugaaagugucaaaaggagcccccugcaggauuccagugauaguagcugaugaucuuacagcggcaaucaauaaaggcauuuugguuacaguuaaccccaucgccucaaccaaugaugaugaagugcugauugaggugaacccaccuuuuggagacagcuacauuaucguugggagaggagauucacgucucacuuaccaguggcacaaagagggaagcucaauaggaaaguuguucacucagaccaugaaaggcguggaacgccuggccgucaugggagacaccgccugggauuucagcuccgcuggaggguucuucacuucgguugggaaaggaauucauacgguguuuggcucugccuuucaggggcuauuuggcggcuugaacuggauaacaaaggucaucaugggggcgguacuuauauggguuggcaucaacacaagaaacaugacaauguccaugagcaugaucuugguaggagugaucaugauguuuuugucucuaggaguuggggcguaaggacuagucccuguucccagagcccacuuuuuuuucuuuuuuugaaauaaaauagccugucuuucagaucuaaaaaaaaaaaaaaaaaaaaaaaaaaaaaaaaaaaaaaaaaaaaaaaaaaaaaaaaaaaaaaaaugcaucccccccccccccccccccccccccccccccaaaggcucuuuucagagccaccagaauu

SEQ ID NO: 1252 - RNA, 2398 nt, Artificial Sequence
  mRNA product Design a-4 comprising derived and/or modified sequence from YFV__NC_002031.1__SSjev-prME-XX (polyprotein: aa122-788) (wt)
gggagacuccugucgggcggaaguaggaggaguagaguuuaaaaacaguacucuuuuuccgguucgggacguaguugaagcaacgacaagccggauaaccgcucuugagacaggaagcuuaccauggguaaacggagcgcuggcucaaucauguggcucgcgagcuuggcaguugucauagcuugugcaggagccgugaccuuggugcggaaaaacagaugguugcuccuaaaugugacaucugaggaccucgggaaaacauucucugugggcacaggcaacugcacaacaaacauuuuggaagccaaguacuggugcccagacucaauggaauacaacugucccaaucucaguccaagagaggagccagaugacauugauugcuggugcuaugggguggaaaacguuagagucgcauaugguaagugugacucagcaggcaggucuaggaggucaagaagggccauugacuugccuacgcaugaaaaccaugguuugaagacccggcaagaaaaauggaugacuggaagaaugggugaaaggcaacuccaaaagauugagagaugguucgugaggaaccccuuuuuugcagugacggcucugaccauugccuaccuugugggaagcaacaugacgcaacgagucgugauugcccuacuggucuuggcuguugguccggccuacucagcucacugcauuggaauuacugacagggauuucauugagggggugcauggaggaacuuggguuucagcuacccuggagcaagacaagugugucacuguuauggccccugacaagccuucauuggacaucucacuagagacaguagccauugauagaccugcugaggugaggaaaguguguuacaaugcaguucucacucaugugaagauuaaugacaagugccccagcacuggagaggcccaccuagcugaagagaacgaaggggacaaugcgugcaagcgcacuuauucugauagaggcuggggcaauggcuguggccuauuugggaaagggagcauuguggcaugcgccaaauucacuugugccaaauccaugaguuuguuugagguugaucagaccaaaauucaguaugucaucagagcacaauugcauguaggggccaagcaggaaaauuggaauaccgacauuaagacucucaaguuugaugcccugucaggcucccaggaagucgaguucauuggguauggaaaagcuacacuggaaugccaggugcaaacugcgguggacuuugguaacaguuacaucgcugagauggaaacagagagcuggauaguggacagacagugggcccaggacuugacccugccauggcagaguggaaguggcgggguguggagagagaugcaucaucuugucgaauuugaaccuccgcaugccgccacuaucagaguacuggcccugggaaaccaggaaggcuccuugaaaacagcucuuacuggcgcaaugaggguuacaaaggacacaaaugacaacaaccuuuacaaacuacaugguggacauguuucuugcagagugaaauugucagcuuugacacucaaggggacauccuacaaaauaugcacugacaaaauguuuuuugucaagaacccaacugacacuggccauggcacuguugugaugcaggugaaagugucaaaaggagcccccugcaggauuccagugauaguagcugaugaucuuacagcggcaaucaauaaaggcauuuugguuacaguuaaccccaucgccucaaccaaugaugaugaagugcugauugaggugaacccaccuuuuggagacagcuacauuaucguugggagaggagauucacgucucacuuaccaguggcacaaagagggaagcucaauaggaaaguuguucacucagaccaugaaaggcguggaacgccuggccgucaugggagacaccgccugggauuucagcuccgcuggaggguucuucacuucgguugggaaaggaauccauacgguguuuggcucugccuuucaggggcuauuuggcggcuugaacuggauaacaaaggucaucaugggggcgguacuuauauggguuggcaucaacacaagaaacaugacaauguccaugagcaugaucuugguaggagugaucaugauguuuuugucucuaggaguuggggcggaucaaggaugcgccaucaacuuuggcaaguaaggacuagucccuguucccagagcccacuuuuuuuucuuuuuuugaaauaaaauagccugucuuucagaucuaaaaaaaaaaaaaaaaaaaaaaaaaaaaaaaaaaaaaaaaaaaaaaaaaaaaaaaaaaaaaaaaugcaucccccccccccccccccccccccccccccccaaaggcucuuuucagagccaccagaauu

SEQ ID NO: 1253 - RNA, 2368 nt, Artificial Sequence
  mRNA product Design a-4 comprising derived and/or modified sequence from YFV__NC_002031.1__SSjev-prME (polyprotein: aa122-778) (wt)
gggagacuccugucgggcggaaguaggaggaguagaguuuaaaaacaguacucuuuuuccgguucgggacguaguugaagcaacgacaagccggauaaccgcucuugagacaggaagcuuaccauggguaaacggagcgcuggcucaaucauguggcucgcgagcuuggcaguugucauagcuugugcaggagccgugaccuuggugcggaaaaacagaugguugcuccuaaaugugacaucugaggaccucgggaaaacauucucugugggcacaggcaacugcacaacaaacauuuuggaagccaaguacuggugcccagacucaauggaauacaacugucccaaucucaguccaagagaggagccagaugacauugauugcuggugcuaugggguggaaaacguuagagucgcauaugguaagugugacucagcaggcaggucuaggaggucaagaagggccauugacuugccuacgcaugaaaaccaugguuugaagacccggcaagaaaaauggaugacuggaagaaugggugaaaggcaacuccaaaagauugagagaugguucgugaggaaccccuuuuuugcagugacggcucugaccauugccuaccuugugggaagcaacaugacgcaacgagucgugauugcccuacuggucuuggcuguugguccggccuacucagcucacugcauuggaauuacugacagggauuucauugagggggugcauggaggaacuuggguuucagcuacccuggagcaagacaagugugucacuguuauggccccugacaagccuucauuggacaucucacuagagacaguagccauugauagaccugcugaggugaggaaaguguguuacaaugcaguucucacucaugugaagauuaaugacaagugccccagcacuggagaggcccaccuagcugaagagaacgaaggggacaaugcgugcaagcgcacuuauucugauagaggcuggggcaauggcuguggccuauuugggaaagggagcauuguggcaugcgccaaauucacuugugccaaauccaugaguuuguuugagguugaucagaccaaaauucaguaugucaucagagcacaauugcauguaggggccaagcaggaaaauuggaauaccgacauuaagacucucaaguuugaugcccugucaggcucccaggaagucgaguucauuggguauggaaaagcuacacuggaaugccaggugcaaacugcgguggacuuugguaacaguuacaucgcugagauggaaacagagagcuggauaguggacagacagugggcccaggacuugacccugccauggcagaguggaaguggcgggguguggagagagaugcaucaucuugucgaauuugaaccuccgcaugccgccacuaucagaguacuggcccugggaaaccaggaaggcuccuugaaaacagcucuuacuggcgcaaugaggguuacaaaggacacaaaugacaacaaccuuuacaaacuacaugguggacauguuucuugcagagugaaauugucagcuuugacacucaaggggacauccuacaaaauaugcacugacaaaauguuuuuugucaagaacccaacugacacuggccauggcacuguugugaugcaggugaaagugucaaaaggagcccccugcaggauuccagugauaguagcugaugaucuuacagcggcaaucaauaaaggcauuuugguuacaguuaaccccaucgccucaaccaaugaugaugaagugcugauugaggugaacccaccuuuuggagacagcuacauuaucguugggagaggagauucacgucucacuuaccaguggcacaaagagggaagcucaauaggaaaguuguucacucagaccaugaaaggcguggaacgccuggccgucaugggagacaccgccugggauuucagcuccgcuggaggguucuucacuucgguugggaaaggaauucauacgguguuuggcucugccuuucaggggcuauuuggcggcuugaacuggauaacaaaggucaucaugggggcgguacuuauauggguuggcaucaacacaagaaacaugacaauguccaugagcaugaucuugguaggagugaucaugauguuuuugucucuaggaguuggggcguaaggacuagucccuguucccagagcccacuuuuuuuucuuuuuuugaaauaaaauagccugucuuucagaucuaaaaaaaaaaaaaaaaaaaaaaaaaaaaaaaaaaaaaaaaaaaaaaaaaaaaaaaaaaaaaaaaugcaucccccccccccccccccccccccccccccccaaaggcucuuuucagagccaccagaauu

SEQ ID NO: 1254 - RNA, 2416 nt, Artificial Sequence
  mRNA product Design a-4 comprising derived and/or modified sequence from YFV__NC_002031.1__X-SS-prME-XX (polyprotein: aa92-788) (opt1) R7230
gggagacuccugucgggcggaaguaggaggaguagaguuuaaaaacaguacucuuuuuccgguucgggacguaguugaagcaacgacaagccggauaaccgcucuugagacaggaagcuuaccaugcggggccugagcucccgcaagcggcgcagccacgacgugcucaccguccaguuccugauccuggggaugcuccugaugaccggcggggugacgcuggugcggaagaaccgcuggcuccugcugaacgucaccuccgaggaccucggcaagaccuucagcguggggaccggcaacugcacgaccaacauccuggaggccaaguacuggugccccgacuccauggaguacaacugcccgaaccugagcccccgggaggagcccgacgacaucgacugcuggugcuacggcguggagaacguccgcguggccuacgggaagugcgacuccgcgggccggagccgccggucccgccgggccaucgaccuccccacccacgagaaccacgggcugaagacccgccaggagaaguggaugacgggccggaugggggagcgccagcugcagaagaucgagcggugguucgugcgcaacccguucuucgccgucaccgcccucaccaucgccuaccuggugggcagcaacaugacccagcggguggucaucgcgcugcucgugcuggccgugggccccgccuacuccgcccacugcaucgggaucacggaccgcgacuucaucgagggcguccacgggggcaccugggugagcgcgacccuggagcaggacaagugcgugaccgucauggcccccgacaagcccucccucgacaucagccuggagacgguggccaucgaccggccggccgaggugcgcaaggucugcuacaacgccgugcugacccacgugaagaucaacgacaagugccccuccaccggcgaggcgcaccucgccgaggagaacgagggggacaacgccugcaagcggaccuacagcgaccggggcugggggaacggcugcgggcuguucggcaagggcuccaucgucgccugcgccaaguucacgugcgcgaagagcaugucccuguucgagguggaccagaccaagauccaguacgucauccgcgcccagcuccacgugggggccaagcaggagaacuggaacaccgacaucaagacccugaaguucgacgcccugagcggcagccaggagguggaguucaucggguacggcaaggccacgcucgagugccagguccagaccgcgguggacuucgggaacuccuacaucgccgagauggagaccgagagcuggaucguggaccggcagugggcccaggaccugacccugcccuggcaguccggcagcggcggggucuggcgcgagaugcaccaccucguggaguucgagcccccgcacgccgccacgauccgggugcuggcgcugggcaaccaggaggggucccucaagaccgcccugaccggcgccaugcgcgucaccaaggacacgaacgacaacaaccuguacaagcuccacgggggccacgugagcugccgggugaagcuguccgcccugacccucaagggcaccagcuacaagaucugcaccgacaagauguucuucgucaagaaccccacggacaccgggcacggcaccguggugaugcaggucaagguguccaagggggcgcccugccgcaucccggugaucgucgccgacgaccugaccgccgccaucaacaagggcauccuggugaccgugaacccgaucgccagcacgaacgacgacgagguccucaucgaggugaacccccccuucggcgacuccuacaucaucguggggcggggcgacagccgccugaccuaccaguggcacaaggagggguccagcaucggcaagcuguucacccagaccaugaagggggucgagcggcuggcggugaugggcgacacggccugggacuucuccagcgccggcggguucuucaccuccgugggcaaggggauccacaccgucuucggcagcgccuuccaggggcucuucggcggccugaacuggaucaccaaggugaucaugggggccgugcugaucugggucggcaucaacacgcgcaacaugaccauguccaugagcaugauccucgugggggugaucaugauguuccugagccugggcgucggggcggaccagggcugcgccaucaacuucggcaagugaggacuagucccuguucccagagcccacuuuuuuuucuuuuuuugaaauaaaauagccugucuuucagaucuaaaaaaaaaaaaaaaaaaaaaaaaaaaaaaaaaaaaaaaaaaaaaaaaaaaaaaaaaaaaaaaaugcaucccccccccccccccccccccccccccccccaaaggcucuuuucagagccaccagaauu

SEQ ID NO: 1255 - RNA, 2353 nt, Artificial Sequence
  mRNA product Design a-4 comprising derived and/or modified sequence from YFV__NC_002031.1__SS-prME (polyprotein: M,aa104-778) (opt1)
gggagacuccugucgggcggaaguaggaggaguagaguuuaaaaacaguacucuuuuuccgguucgggacguaguugaagcaacgacaagccggauaaccgcucuugagacaggaagcuuaccauggacgugcugaccguccaguuccucauccugggcaugcugcucaugaccgggggcgugacccugguccggaagaaccgcuggcuccugcugaacgugaccagcgaggaccucggcaagacguucuccguggggaccggcaacugcaccaccaacauccuggaggccaaguacuggugccccgacagcauggaguacaacugccccaaccuguccccgcgggaggagcccgacgacaucgacugcuggugcuacggggucgagaacgugcgcguggccuacggcaagugcgacagcgcggggcggucccgccggagccgccgggccaucgaccugcccacccacgagaaccacggccucaagacccggcaggagaaguggaugacggggcgcaugggcgagcggcagcugcagaagaucgagcgcugguucgugcggaacccguucuucgccgucaccgcgcugaccaucgccuaccucguggggagcaacaugacccagcgcguggucaucgcccugcuggugcucgccgugggccccgccuacuccgcgcacugcaucgggaucacggaccgggacuucaucgagggcguccacggcgggaccugggugagcgccacccuggagcaggacaagugcgugaccgucauggcccccgacaagcccucccuggacaucagccucgagacgguggccaucgaccgcccggcggaggugcggaaggucugcuacaacgccgugcugacccacgugaagaucaacgacaagugccccuccaccggcgaggcccaccuggccgaggagaacgagggggacaacgccugcaagcgcaccuacagcgaccggggcugggggaacggcugcggccucuucgggaagggcuccaucgucgcgugcgccaaguucacgugcgccaagagcaugucccuguucgagguggaccagaccaagauccaguacgugauccgcgcccagcugcacgucggggccaagcaggagaacuggaacaccgacaucaagacccucaaguucgacgcgcugagcggcucccaggagguggaguucaucggcuacgggaaggccacgcuggagugccaggugcagaccgccgucgacuucggcaacagcuacaucgccgagauggagaccgaguccuggaucguggaccggcagugggcccaggaccucacccugcccuggcagagcggguccggcgggguguggcgcgagaugcaccaccuggucgaguucgagcccccgcacgcggccacgauccgggugcucgcccugggcaaccaggagggcagccugaagaccgcccucaccggggccaugcgcgucaccaaggacacgaacgacaacaaccuguacaagcugcacggcgggcacguguccugccgggugaagcucagcgcgcugacccugaagggcaccuccuacaagaucugcaccgacaagauguucuucgucaagaaccccacggacaccgggcacggcaccguggugaugcaggucaaggugagcaagggcgcccccugccgcaucccggugaucgucgccgacgaccucaccgccgcgaucaacaaggggauccuggugacggugaaccccaucgccagcaccaacgacgacgagguccugaucgaggugaacccgcccuucggcgacuccuacaucaucguggggcggggcgacagccgccucaccuaccaguggcacaaggagggguccagcaucggcaagcuguucacccagacgaugaagggcgucgagcggcuggccgugaugggggacaccgccugggacuucuccagcgccggcggguucuucaccuccgugggcaagggcauccacaccgucuucgggagcgcguuccagggccucuucgggggccugaacuggaucaccaaggugaucaugggggccgugcugaucugggucggcaucaacacgcgcaacaugaccauguccaugagcaugauccucgugggcgugaucaugauguuccugucccugggggucggcgccugaggacuagucccuguucccagagcccacuuuuuuuucuuuuuuugaaauaaaauagccugucuuucagaucuaaaaaaaaaaaaaaaaaaaaaaaaaaaaaaaaaaaaaaaaaaaaaaaaaaaaaaaaaaaaaaaaugcaucccccccccccccccccccccccccccccccaaaggcucuuuucagagccaccagaauu

SEQ ID NO: 1256 - RNA, 2380 nt, Artificial Sequence
  mRNA product Design a-4 comprising derived and/or modified sequence from YFV__NC_002031.1__SSIgE-prME-XX (polyprotein: aa122-788) (opt1)
gggagacuccugucgggcggaaguaggaggaguagaguuuaaaaacaguacucuuuuuccgguucgggacguaguugaagcaacgacaagccggauaaccgcucuugagacaggaagcuuaccauggacuggaccuggauccuguuccucguggccgccgcgacccgcguccacagcgugacgcuggugcggaagaaccgcuggcuccugcugaacgucaccuccgaggaccucggcaagaccuucagcguggggaccggcaacugcacgaccaacauccuggaggccaaguacuggugccccgacuccauggaguacaacugcccgaaccugagcccccgggaggagcccgacgacaucgacugcuggugcuacggcguggagaacguccgcguggccuacgggaagugcgacuccgcgggccggagccgccggucccgccgggccaucgaccuccccacccacgagaaccacgggcugaagacccgccaggagaaguggaugacgggccggaugggggagcgccagcugcagaagaucgagcggugguucgugcgcaacccguucuucgccgucaccgcccucaccaucgccuaccuggugggcagcaacaugacccagcggguggucaucgcgcugcucgugcuggccgugggccccgccuacuccgcccacugcaucgggaucacggaccgcgacuucaucgagggcguccacgggggcaccugggugagcgcgacccuggagcaggacaagugcgugaccgucauggcccccgacaagcccucccucgacaucagccuggagacgguggccaucgaccggccggccgaggugcgcaaggucugcuacaacgccgugcugacccacgugaagaucaacgacaagugccccuccaccggcgaggcgcaccucgccgaggagaacgagggggacaacgccugcaagcggaccuacagcgaccggggcugggggaacggcugcgggcuguucggcaagggcuccaucgucgccugcgccaaguucacgugcgcgaagagcaugucccuguucgagguggaccagaccaagauccaguacgucauccgcgcccagcuccacgugggggccaagcaggagaacuggaacaccgacaucaagacccugaaguucgacgcccugagcggcagccaggagguggaguucaucggguacggcaaggccacgcucgagugccagguccagaccgcgguggacuucgggaacuccuacaucgccgagauggagaccgagagcuggaucguggaccggcagugggcccaggaccugacccugcccuggcaguccggcagcggcggggucuggcgcgagaugcaccaccucguggaguucgagcccccgcacgccgccacgauccgggugcuggcgcugggcaaccaggaggggucccucaagaccgcccugaccggcgccaugcgcgucaccaaggacacgaacgacaacaaccuguacaagcuccacgggggccacgugagcugccgggugaagcuguccgcccugacccucaagggcaccagcuacaagaucugcaccgacaagauguucuucgucaagaaccccacggacaccgggcacggcaccguggugaugcaggucaagguguccaagggggcgcccugccgcaucccggugaucgucgccgacgaccugaccgccgccaucaacaagggcauccuggugaccgugaacccgaucgccagcacgaacgacgacgagguccucaucgaggugaacccccccuucggcgacuccuacaucaucguggggcggggcgacagccgccugaccuaccaguggcacaaggagggguccagcaucggcaagcuguucacccagaccaugaagggggucgagcggcuggcggugaugggcgacacggccugggacuucuccagcgccggcggguucuucaccuccgugggcaaggggauccacaccgucuucggcagcgccuuccaggggcucuucggcggccugaacuggaucaccaaggugaucaugggggccgugcugaucugggucggcaucaacacgcgcaacaugaccauguccaugagcaugauccucgugggggugaucaugauguuccugagccugggcgucggggcggaccagggcugcgccaucaacuucggcaagugaggacuagucccuguucccagagcccacuuuuuuuucuuuuuuugaaauaaaauagccugucuuucagaucuaaaaaaaaaaaaaaaaaaaaaaaaaaaaaaaaaaaaaaaaaaaaaaaaaaaaaaaaaaaaaaaaugcaucccccccccccccccccccccccccccccccaaaggcucuuuucagagccaccagaauu

SEQ ID NO: 1257 - RNA, 2350 nt, Artificial Sequence
  mRNA product Design a-4 comprising derived and/or modified sequence from YFV__NC_002031.1__SSIgE-prME (polyprotein: aa122-778) (opt1)
gggagacuccugucgggcggaaguaggaggaguagaguuuaaaaacaguacucuuuuuccgguucgggacguaguugaagcaacgacaagccggauaaccgcucuugagacaggaagcuuaccauggacuggaccuggauccuguuccucguggccgccgcgacccgcguccacagcgugacccugguccgcaagaaccgguggcuccugcugaacgugaccagcgaggaccucggcaagacguucuccguggggaccggcaacugcaccaccaacauccuggaggccaaguacuggugccccgacagcauggaguacaacugcccgaaccuguccccgcgcgaggagcccgacgacaucgacugcuggugcuacggggucgagaacgugcggguggccuacggcaagugcgacagcgcggggcgcucccggcgcagccggcgcgccaucgaccuccccacgcacgagaaccacggccugaagacccggcaggagaaguggaugaccggccgcaugggggagcggcagcugcagaagaucgagcgcugguucguccggaaccccuucuucgccgugaccgcccucacgaucgccuaccuggugggcuccaacaugacccagcgcgucgugaucgcgcugcucgugcuggccgucgggcccgccuacagcgcccacugcaucggcaucaccgaccgggacuucaucgagggggugcacggcggcaccuggguguccgcgacgcuggagcaggacaagugcgucaccgugauggcccccgacaagcccagccucgacaucucccuggagaccguggccaucgaccgcccggccgagguccggaaggugugcuacaacgccgugcugacccacgucaagaucaacgacaagugccccagcacgggggaggcgcaccucgccgaggagaacgagggcgacaacgccugcaagcgcaccuacuccgaccggggguggggcaacggcugcgggcuguucggcaaggggagcaucguggccugcgccaaguucaccugcgcgaaguccaugagccuguucgagguggaccagaccaagauccaguacgucauccgcgcccagcuccacgugggcgccaagcaggagaacuggaacacggacaucaagacccugaaguucgacgcccuguccgggagccaggaggucgaguucaucggcuacggcaaggccacccucgagugccaggugcagaccgcgguggacuucgggaacuccuacaucgccgagauggagacggagagcuggaucgucgaccggcagugggcccaggaccugacccugcccuggcagagcggcuccgggggcguguggcgcgagaugcaccaccucguggaguucgagcccccgcacgccgccaccauccgcguccuggcgcuggggaaccaggagggcagccucaagaccgcccugacgggcgccaugcgggugaccaaggacaccaacgacaacaaccuguacaagcuccacgggggccacguguccugccgcgucaagcugagcgcccugacccucaaggggacguccuacaagaucugcaccgacaagauguucuucgugaagaaccccaccgacaccggccacgggacgguggucaugcaggugaaggugagcaagggcgcgcccugccggauccccgucaucguggccgacgaccugaccgccgccaucaacaagggcauccuggugaccgucaacccgaucgccuccaccaacgacgacgaggugcucaucgaggugaacccgcccuucggggacagcuacaucaucgucggccgcggggacucccggcugaccuaccaguggcacaaggagggcagcuccaucggcaagcuguucacgcagaccaugaaggggguggagcgccucgcggugaugggcgacaccgccugggacuucagcuccgccgggggcuucuucaccagcgucgggaagggcauccacacgguguucggcuccgccuuccaggggcuguucggcgggcugaacuggaucaccaaggugaucaugggcgccguccucaucuggguggggaucaacacccggaacaugaccaugagcauguccaugauccuggugggcgucaucaugauguuccugagccugggcgugggggcgugaggacuagucccuguucccagagcccacuuuuuuuucuuuuuuugaaauaaaauagccugucuuucagaucuaaaaaaaaaaaaaaaaaaaaaaaaaaaaaaaaaaaaaaaaaaaaaaaaaaaaaaaaaaaaaaaaugcaucccccccccccccccccccccccccccccccaaaggcucuuuucagagccaccagaauu

SEQ ID NO: 1258 - RNA, 2398 nt, Artificial Sequence
  mRNA product Design a-4 comprising derived and/or modified sequence from YFV__NC_002031.1__SSjev-prME-XX (polyprotein: aa122-788) (opt1)
gggagacuccugucgggcggaaguaggaggaguagaguuuaaaaacaguacucuuuuuccgguucgggacguaguugaagcaacgacaagccggauaaccgcucuugagacaggaagcuuaccaugggcaagcgcagcgccggguccaucauguggcuggccagccucgcgguggucaucgccugcgccggcgccgugacgcuggugcggaagaaccgcuggcuccugcugaacgucaccuccgaggaccucggcaagaccuucagcguggggaccggcaacugcacgaccaacauccuggaggccaaguacuggugccccgacuccauggaguacaacugcccgaaccugagcccccgggaggagcccgacgacaucgacugcuggugcuacggcguggagaacguccgcguggccuacgggaagugcgacuccgcgggccggagccgccggucccgccgggccaucgaccuccccacccacgagaaccacgggcugaagacccgccaggagaaguggaugacgggccggaugggggagcgccagcugcagaagaucgagcggugguucgugcgcaacccguucuucgccgucaccgcccucaccaucgccuaccuggugggcagcaacaugacccagcggguggucaucgcgcugcucgugcuggccgugggccccgccuacuccgcccacugcaucgggaucacggaccgcgacuucaucgagggcguccacgggggcaccugggugagcgcgacccuggagcaggacaagugcgugaccgucauggcccccgacaagcccucccucgacaucagccuggagacgguggccaucgaccggccggccgaggugcgcaaggucugcuacaacgccgugcugacccacgugaagaucaacgacaagugccccuccaccggcgaggcgcaccucgccgaggagaacgagggggacaacgccugcaagcggaccuacagcgaccggggcugggggaacggcugcgggcuguucggcaagggcuccaucgucgccugcgccaaguucacgugcgcgaagagcaugucccuguucgagguggaccagaccaagauccaguacgucauccgcgcccagcuccacgugggggccaagcaggagaacuggaacaccgacaucaagacccugaaguucgacgcccugagcggcagccaggagguggaguucaucggguacggcaaggccacgcucgagugccagguccagaccgcgguggacuucgggaacuccuacaucgccgagauggagaccgagagcuggaucguggaccggcagugggcccaggaccugacccugcccuggcaguccggcagcggcggggucuggcgcgagaugcaccaccucguggaguucgagcccccgcacgccgccacgauccgggugcuggcgcugggcaaccaggaggggucccucaagaccgcccugaccggcgccaugcgcgucaccaaggacacgaacgacaacaaccuguacaagcuccacgggggccacgugagcugccgggugaagcuguccgcccugacccucaagggcaccagcuacaagaucugcaccgacaagauguucuucgucaagaaccccacggacaccgggcacggcaccguggugaugcaggucaagguguccaagggggcgcccugccgcaucccggugaucgucgccgacgaccugaccgccgccaucaacaagggcauccuggugaccgugaacccgaucgccagcacgaacgacgacgagguccucaucgaggugaacccccccuucggcgacuccuacaucaucguggggcggggcgacagccgccugaccuaccaguggcacaaggagggguccagcaucggcaagcuguucacccagaccaugaagggggucgagcggcuggcggugaugggcgacacggccugggacuucuccagcgccggcggguucuucaccuccgugggcaaggggauccacaccgucuucggcagcgccuuccaggggcucuucggcggccugaacuggaucaccaaggugaucaugggggccgugcugaucugggucggcaucaacacgcgcaacaugaccauguccaugagcaugauccucgugggggugaucaugauguuccugagccugggcgucggggcggaccagggcugcgccaucaacuucggcaagugaggacuagucccuguucccagagcccacuuuuuuuucuuuuuuugaaauaaaauagccugucuuucagaucuaaaaaaaaaaaaaaaaaaaaaaaaaaaaaaaaaaaaaaaaaaaaaaaaaaaaaaaaaaaaaaaaugcaucccccccccccccccccccccccccccccccaaaggcucuuuucagagccaccagaauu

SEQ ID NO: 1259 - RNA, 2368 nt, Artificial Sequence
  mRNA product Design a-4 comprising derived and/or modified sequence from YFV__NC_002031.1__SSjev-prME (polyprotein: aa122-778) (opt1)
gggagacuccugucgggcggaaguaggaggaguagaguuuaaaaacaguacucuuuuuccgguucgggacguaguugaagcaacgacaagccggauaaccgcucuugagacaggaagcuuaccaugggcaagcgcagcgccggguccaucauguggcuggccagccucgcgguggucaucgccugcgccggcgccgugacccugguccgcaagaaccgguggcuccugcugaacgugaccagcgaggaccucggcaagacguucuccguggggaccggcaacugcaccaccaacauccuggaggccaaguacuggugccccgacagcauggaguacaacugcccgaaccuguccccgcgcgaggagcccgacgacaucgacugcuggugcuacggggucgagaacgugcggguggccuacggcaagugcgacagcgcggggcgcucccggcgcagccggcgcgccaucgaccuccccacgcacgagaaccacggccugaagacccggcaggagaaguggaugaccggccgcaugggggagcggcagcugcagaagaucgagcgcugguucguccggaaccccuucuucgccgugaccgcccucacgaucgccuaccuggugggcuccaacaugacccagcgcgucgugaucgcgcugcucgugcuggccgucgggcccgccuacagcgcccacugcaucggcaucaccgaccgggacuucaucgagggggugcacggcggcaccuggguguccgcgacgcuggagcaggacaagugcgucaccgugauggcccccgacaagcccagccucgacaucucccuggagaccguggccaucgaccgcccggccgagguccggaaggugugcuacaacgccgugcugacccacgucaagaucaacgacaagugccccagcacgggggaggcgcaccucgccgaggagaacgagggcgacaacgccugcaagcgcaccuacuccgaccggggguggggcaacggcugcgggcuguucggcaaggggagcaucguggccugcgccaaguucaccugcgcgaaguccaugagccuguucgagguggaccagaccaagauccaguacgucauccgcgcccagcuccacgugggcgccaagcaggagaacuggaacacggacaucaagacccugaaguucgacgcccuguccgggagccaggaggucgaguucaucggcuacggcaaggccacccucgagugccaggugcagaccgcgguggacuucgggaacuccuacaucgccgagauggagacggagagcuggaucgucgaccggcagugggcccaggaccugacccugcccuggcagagcggcuccgggggcguguggcgcgagaugcaccaccucguggaguucgagcccccgcacgccgccaccauccgcguccuggcgcuggggaaccaggagggcagccucaagaccgcccugacgggcgccaugcgggugaccaaggacaccaacgacaacaaccuguacaagcuccacgggggccacguguccugccgcgucaagcugagcgcccugacccucaaggggacguccuacaagaucugcaccgacaagauguucuucgugaagaaccccaccgacaccggccacgggacgguggucaugcaggugaaggugagcaagggcgcgcccugccggauccccgucaucguggccgacgaccugaccgccgccaucaacaagggcauccuggugaccgucaacccgaucgccuccaccaacgacgacgaggugcucaucgaggugaacccgcccuucggggacagcuacaucaucgucggccgcggggacucccggcugaccuaccaguggcacaaggagggcagcuccaucggcaagcuguucacgcagaccaugaaggggguggagcgccucgcggugaugggcgacaccgccugggacuucagcuccgccgggggcuucuucaccagcgucgggaagggcauccacacgguguucggcuccgccuuccaggggcuguucggcgggcugaacuggaucaccaaggugaucaugggcgccguccucaucuggguggggaucaacacccggaacaugaccaugagcauguccaugauccuggugggcgucaucaugauguuccugagccugggcgugggggcgugaggacuagucccuguucccagagcccacuuuuuuuucuuuuuuugaaauaaaauagccugucuuucagaucuaaaaaaaaaaaaaaaaaaaaaaaaaaaaaaaaaaaaaaaaaaaaaaaaaaaaaaaaaaaaaaaaugcaucccccccccccccccccccccccccccccccaaaggcucuuuucagagccaccagaauu

SEQ ID NO: 1260 - RNA, 2416 nt, Artificial Sequence
  mRNA product Design a-4 comprising derived and/or modified sequence from YFV__NC_002031.1__X-SS-prME-XX (polyprotein: aa92-788) (opt1)
gggagacuccugucgggcggaaguaggaggaguagaguuuaaaaacaguacucuuuuuccgguucgggacguaguugaagcaacgacaagccggauaaccgcucuugagacaggaagcuuaccaugcggggccugagcucccgcaagcggcgcagccacgacgugcucaccguccaguuccugauccuggggaugcuccugaugaccggcggggugacgcuggugcggaagaaccgcuggcuccugcugaacgucaccuccgaggaccucggcaagaccuucagcguggggaccggcaacugcacgaccaacauccuggaggccaaguacuggugccccgacuccauggaguacaacugcccgaaccugagcccccgggaggagcccgacgacaucgacugcuggugcuacggcguggagaacguccgcguggccuacgggaagugcgacuccgcgggccggagccgccggucccgccgggccaucgaccuccccacccacgagaaccacgggcugaagacccgccaggagaaguggaugacgggccggaugggggagcgccagcugcagaagaucgagcggugguucgugcgcaacccguucuucgccgucaccgcccucaccaucgccuaccuggugggcagcaacaugacccagcggguggucaucgcgcugcucgugcuggccgugggccccgccuacuccgcccacugcaucgggaucacggaccgcgacuucaucgagggcguccacgggggcaccugggugagcgcgacccuggagcaggacaagugcgugaccgucauggcccccgacaagcccucccucgacaucagccuggagacgguggccaucgaccggccggccgaggugcgcaaggucugcuacaacgccgugcugacccacgugaagaucaacgacaagugccccuccaccggcgaggcgcaccucgccgaggagaacgagggggacaacgccugcaagcggaccuacagcgaccggggcugggggaacggcugcgggcuguucggcaagggcuccaucgucgccugcgccaaguucacgugcgcgaaguccaugagccuguucgagguggaccagaccaagauccaguacgucauccgcgcccagcuccacgugggggccaagcaggagaacuggaacaccgacaucaagacccugaaguucgacgcccugagcggcagccaggagguggaguucaucggguacggcaaggccacgcucgagugccagguccagaccgcgguggacuucgggaacuccuacaucgccgagauggagaccgagagcuggaucguggaccggcagugggcccaggaccugacccugcccuggcaguccggcagcggcggggucuggcgcgagaugcaccaccucguggaguucgagcccccgcacgccgccacgauccgggugcuggcgcugggcaaccaggaggggucccucaagaccgcccugaccggcgccaugcgcgucaccaaggacacgaacgacaacaaccuguacaagcuccacgggggccacgugagcugccgggugaagcuguccgcccugacccucaagggcaccagcuacaagaucugcaccgacaagauguucuucgucaagaaccccacggacaccgggcacggcaccguggugaugcaggucaagguguccaagggggcgcccugccgcaucccggugaucgucgccgacgaccugaccgccgccaucaacaagggcauccuggugaccgugaacccgaucgccagcacgaacgacgacgagguccucaucgaggugaacccccccuucggcgacuccuacaucaucguggggcggggcgacagccgccugaccuaccaguggcacaaggagggguccagcaucggcaagcuguucacccagaccaugaagggggucgagcggcuggcggugaugggcgacacggccugggacuucuccagcgccggcggguucuucaccuccgugggcaaggggauccacaccgucuucggcagcgccuuccaggggcuguucggcggccucaacuggaucaccaaggugaucaugggggccgugcugaucugggucggcaucaacacgcgcaacaugaccauguccaugagcaugauccucgugggggugaucaugauguuccugagccugggcgucggggcggaccagggcugcgccaucaacuucggcaagugaggacuagucccuguucccagagcccacuuuuuuuucuuuuuuugaaauaaaauagccugucuuucagaucuaaaaaaaaaaaaaaaaaaaaaaaaaaaaaaaaaaaaaaaaaaaaaaaaaaaaaaaaaaaaaaaaugcaucccccccccccccccccccccccccccccccaaaggcucuuuucagagccaccagaauu

SEQ ID NO: 1261 - RNA, 2353 nt, Artificial Sequence
  mRNA product Design a-4 comprising derived and/or modified sequence from YFV__NC_002031.1__SS-prME (polyprotein: M,aa104-778) (opt1)
gggagacuccugucgggcggaaguaggaggaguagaguuuaaaaacaguacucuuuuuccgguucgggacguaguugaagcaacgacaagccggauaaccgcucuugagacaggaagcuuaccauggacgugcucaccguccaguuccugauccuggggaugcuccugaugaccggcggggugacgcuggugcggaagaaccgcuggcuccugcugaacgucaccuccgaggaccucggcaagaccuucagcguggggaccggcaacugcacgaccaacauccuggaggccaaguacuggugccccgacuccauggaguacaacugcccgaaccugagcccccgggaggagcccgacgacaucgacugcuggugcuacggcguggagaacguccgcguggccuacgggaagugcgacuccgcgggccggagccgccggucccgccgggccaucgaccuccccacccacgagaaccacgggcugaagacccgccaggagaaguggaugacgggccggaugggggagcgccagcugcagaagaucgagcggugguucgugcgcaacccguucuucgccgucaccgcccucaccaucgccuaccuggugggcagcaacaugacccagcggguggucaucgcgcugcucgugcuggccgugggccccgccuacuccgcccacugcaucgggaucacggaccgcgacuucaucgagggcguccacgggggcaccugggugagcgcgacccuggagcaggacaagugcgugaccgucauggcccccgacaagcccucccucgacaucagccuggagacgguggccaucgaccggccggccgaggugcgcaaggucugcuacaacgccgugcugacccacgugaagaucaacgacaagugccccuccaccggcgaggcgcaccucgccgaggagaacgagggggacaacgccugcaagcggaccuacagcgaccggggcugggggaacggcugcgggcuguucggcaagggcuccaucgucgccugcgccaaguucacgugcgcgaaguccaugagccuguucgagguggaccagaccaagauccaguacgucauccgcgcccagcuccacgugggggccaagcaggagaacuggaacaccgacaucaagacccugaaguucgacgcccugagcggcagccaggagguggaguucaucggguacggcaaggccacgcucgagugccagguccagaccgcgguggacuucgggaacuccuacaucgccgagauggagaccgagagcuggaucguggaccggcagugggcccaggaccugacccugcccuggcaguccggcagcggcggggucuggcgcgagaugcaccaccucguggaguucgagcccccgcacgccgccacgauccgggugcuggcgcugggcaaccaggaggggucccucaagaccgcccugaccggcgccaugcgcgucaccaaggacacgaacgacaacaaccuguacaagcuccacgggggccacgugagcugccgggugaagcuguccgcccugacccucaagggcaccagcuacaagaucugcaccgacaagauguucuucgucaagaaccccacggacaccgggcacggcaccguggugaugcaggucaagguguccaagggggcgcccugccgcaucccggugaucgucgccgacgaccugaccgccgccaucaacaagggcauccuggugaccgugaacccgaucgccagcacgaacgacgacgagguccucaucgaggugaacccccccuucggcgacuccuacaucaucguggggcggggcgacagccgccugaccuaccaguggcacaaggagggguccagcaucggcaagcuguucacccagaccaugaagggggucgagcggcuggcggugaugggcgacacggccugggacuucuccagcgccggcggguucuucaccuccgugggcaaggggauccacaccgucuucggcagcgccuuccaggggcuguucggcggccucaacuggaucaccaaggugaucaugggggccgugcugaucugggucggcaucaacacgcgcaacaugaccauguccaugagcaugauccucgugggggugaucaugauguuccugagccugggcgucggggcgugaggacuagucccuguucccagagcccacuuuuuuuucuuuuuuugaaauaaaauagccugucuuucagaucuaaaaaaaaaaaaaaaaaaaaaaaaaaaaaaaaaaaaaaaaaaaaaaaaaaaaaaaaaaaaaaaaugcaucccccccccccccccccccccccccccccccaaaggcucuuuucagagccaccagaauu

SEQ ID NO: 1262 - RNA, 2380 nt, Artificial Sequence
  mRNA product Design a-4 comprising derived and/or modified sequence from YFV__NC_002031.1__SSIgE-prME-XX (polyprotein: aa122-788) (opt1)
gggagacuccugucgggcggaaguaggaggaguagaguuuaaaaacaguacucuuuuuccgguucgggacguaguugaagcaacgacaagccggauaaccgcucuugagacaggaagcuuaccauggacuggaccuggauccuguuccucguggccgccgcgacccgcguccacagcgugacgcuggugcggaagaaccgcuggcuccugcugaacgucaccuccgaggaccucggcaagaccuucagcguggggaccggcaacugcacgaccaacauccuggaggccaaguacuggugccccgacuccauggaguacaacugcccgaaccugagcccccgggaggagcccgacgacaucgacugcuggugcuacggcguggagaacguccgcguggccuacgggaagugcgacuccgcgggccggagccgccggucccgccgggccaucgaccuccccacccacgagaaccacgggcugaagacccgccaggagaaguggaugacgggccggaugggggagcgccagcugcagaagaucgagcggugguucgugcgcaacccguucuucgccgucaccgcccucaccaucgccuaccuggugggcagcaacaugacccagcggguggucaucgcgcugcucgugcuggccgugggccccgccuacuccgcccacugcaucgggaucacggaccgcgacuucaucgagggcguccacgggggcaccugggugagcgcgacccuggagcaggacaagugcgugaccgucauggcccccgacaagcccucccucgacaucagccuggagacgguggccaucgaccggccggccgaggugcgcaaggucugcuacaacgccgugcugacccacgugaagaucaacgacaagugccccuccaccggcgaggcgcaccucgccgaggagaacgagggggacaacgccugcaagcggaccuacagcgaccggggcugggggaacggcugcgggcuguucggcaagggcuccaucgucgccugcgccaaguucacgugcgcgaaguccaugagccuguucgagguggaccagaccaagauccaguacgucauccgcgcccagcuccacgugggggccaagcaggagaacuggaacaccgacaucaagacccugaaguucgacgcccugagcggcagccaggagguggaguucaucggguacggcaaggccacgcucgagugccagguccagaccgcgguggacuucgggaacuccuacaucgccgagauggagaccgagagcuggaucguggaccggcagugggcccaggaccugacccugcccuggcaguccggcagcggcggggucuggcgcgagaugcaccaccucguggaguucgagcccccgcacgccgccacgauccgggugcuggcgcugggcaaccaggaggggucccucaagaccgcccugaccggcgccaugcgcgucaccaaggacacgaacgacaacaaccuguacaagcuccacgggggccacgugagcugccgggugaagcuguccgcccugacccucaagggcaccagcuacaagaucugcaccgacaagauguucuucgucaagaaccccacggacaccgggcacggcaccguggugaugcaggucaagguguccaagggggcgcccugccgcaucccggugaucgucgccgacgaccugaccgccgccaucaacaagggcauccuggugaccgugaacccgaucgccagcacgaacgacgacgagguccucaucgaggugaacccccccuucggcgacuccuacaucaucguggggcggggcgacagccgccugaccuaccaguggcacaaggagggguccagcaucggcaagcuguucacccagaccaugaagggggucgagcggcuggcggugaugggcgacacggccugggacuucuccagcgccggcggguucuucaccuccgugggcaaggggauccacaccgucuucggcagcgccuuccaggggcuguucggcggccucaacuggaucaccaaggugaucaugggggccgugcugaucugggucggcaucaacacgcgcaacaugaccauguccaugagcaugauccucgugggggugaucaugauguuccugagccugggcgucggggcggaccagggcugcgccaucaacuucggcaagugaggacuagucccuguucccagagcccacuuuuuuuucuuuuuuugaaauaaaauagccugucuuucagaucuaaaaaaaaaaaaaaaaaaaaaaaaaaaaaaaaaaaaaaaaaaaaaaaaaaaaaaaaaaaaaaaaugcaucccccccccccccccccccccccccccccccaaaggcucuuuucagagccaccagaauu

SEQ ID NO: 1263 - RNA, 2350 nt, Artificial Sequence
  mRNA product Design a-4 comprising derived and/or modified sequence from YFV__NC_002031.1__SSIgE-prME (polyprotein: aa122-778) (opt1)
gggagacuccugucgggcggaaguaggaggaguagaguuuaaaaacaguacucuuuuuccgguucgggacguaguugaagcaacgacaagccggauaaccgcucuugagacaggaagcuuaccauggacuggaccuggauccuguuccucguggccgccgcgacccgcguccacagcgugacgcuggugcggaagaaccgcuggcuccugcugaacgucaccuccgaggaccucggcaagaccuucagcguggggaccggcaacugcacgaccaacauccuggaggccaaguacuggugccccgacuccauggaguacaacugcccgaaccugagcccccgggaggagcccgacgacaucgacugcuggugcuacggcguggagaacguccgcguggccuacgggaagugcgacuccgcgggccggagccgccggucccgccgggccaucgaccuccccacccacgagaaccacgggcugaagacccgccaggagaaguggaugacgggccggaugggggagcgccagcugcagaagaucgagcggugguucgugcgcaacccguucuucgccgucaccgcccucaccaucgccuaccuggugggcagcaacaugacccagcggguggucaucgcgcugcucgugcuggccgugggccccgccuacuccgcccacugcaucgggaucacggaccgcgacuucaucgagggcguccacgggggcaccugggugagcgcgacccuggagcaggacaagugcgugaccgucauggcccccgacaagcccucccucgacaucagccuggagacgguggccaucgaccggccggccgaggugcgcaaggucugcuacaacgccgugcugacccacgugaagaucaacgacaagugccccuccaccggcgaggcgcaccucgccgaggagaacgagggggacaacgccugcaagcggaccuacagcgaccggggcugggggaacggcugcgggcuguucggcaagggcuccaucgucgccugcgccaaguucacgugcgcgaaguccaugagccuguucgagguggaccagaccaagauccaguacgucauccgcgcccagcuccacgugggggccaagcaggagaacuggaacaccgacaucaagacccugaaguucgacgcccugagcggcagccaggagguggaguucaucggguacggcaaggccacgcucgagugccagguccagaccgcgguggacuucgggaacuccuacaucgccgagauggagaccgagagcuggaucguggaccggcagugggcccaggaccugacccugcccuggcaguccggcagcggcggggucuggcgcgagaugcaccaccucguggaguucgagcccccgcacgccgccacgauccgggugcuggcgcugggcaaccaggaggggucccucaagaccgcccugaccggcgccaugcgcgucaccaaggacacgaacgacaacaaccuguacaagcuccacgggggccacgugagcugccgggugaagcuguccgcccugacccucaagggcaccagcuacaagaucugcaccgacaagauguucuucgucaagaaccccacggacaccgggcacggcaccguggugaugcaggucaagguguccaagggggcgcccugccgcaucccggugaucgucgccgacgaccugaccgccgccaucaacaagggcauccuggugaccgugaacccgaucgccagcacgaacgacgacgagguccucaucgaggugaacccccccuucggcgacuccuacaucaucguggggcggggcgacagccgccugaccuaccaguggcacaaggagggguccagcaucggcaagcuguucacccagaccaugaagggggucgagcggcuggcggugaugggcgacacggccugggacuucuccagcgccggcggguucuucaccuccgugggcaaggggauccacaccgucuucggcagcgccuuccaggggcuguucggcggccucaacuggaucaccaaggugaucaugggggccgugcugaucugggucggcaucaacacgcgcaacaugaccauguccaugagcaugauccucgugggggugaucaugauguuccugagccugggcgucggggcgugaggacuagucccuguucccagagcccacuuuuuuuucuuuuuuugaaauaaaauagccugucuuucagaucuaaaaaaaaaaaaaaaaaaaaaaaaaaaaaaaaaaaaaaaaaaaaaaaaaaaaaaaaaaaaaaaaugcaucccccccccccccccccccccccccccccccaaaggcucuuuucagagccaccagaauu

SEQ ID NO: 1264 - RNA, 2398 nt, Artificial Sequence
  mRNA product Design a-4 comprising derived and/or modified sequence from YFV__NC_002031.1__SSjev-prME-XX (polyprotein: aa122-788) (opt1)
gggagacuccugucgggcggaaguaggaggaguagaguuuaaaaacaguacucuuuuuccgguucgggacguaguugaagcaacgacaagccggauaaccgcucuugagacaggaagcuuaccaugggcaagcgcagcgccggguccaucauguggcuggccagccucgcgguggucaucgccugcgccggcgccgugacgcuggugcggaagaaccgcuggcuccugcugaacgucaccuccgaggaccucggcaagaccuucagcguggggaccggcaacugcacgaccaacauccuggaggccaaguacuggugccccgacuccauggaguacaacugcccgaaccugagcccccgggaggagcccgacgacaucgacugcuggugcuacggcguggagaacguccgcguggccuacgggaagugcgacuccgcgggccggagccgccggucccgccgggccaucgaccuccccacccacgagaaccacgggcugaagacccgccaggagaaguggaugacgggccggaugggggagcgccagcugcagaagaucgagcggugguucgugcgcaacccguucuucgccgucaccgcccucaccaucgccuaccuggugggcagcaacaugacccagcggguggucaucgcgcugcucgugcuggccgugggccccgccuacuccgcccacugcaucgggaucacggaccgcgacuucaucgagggcguccacgggggcaccugggugagcgcgacccuggagcaggacaagugcgugaccgucauggcccccgacaagcccucccucgacaucagccuggagacgguggccaucgaccggccggccgaggugcgcaaggucugcuacaacgccgugcugacccacgugaagaucaacgacaagugccccuccaccggcgaggcgcaccucgccgaggagaacgagggggacaacgccugcaagcggaccuacagcgaccggggcugggggaacggcugcgggcuguucggcaagggcuccaucgucgccugcgccaaguucacgugcgcgaaguccaugagccuguucgagguggaccagaccaagauccaguacgucauccgcgcccagcuccacgugggggccaagcaggagaacuggaacaccgacaucaagacccugaaguucgacgcccugagcggcagccaggagguggaguucaucggguacggcaaggccacgcucgagugccagguccagaccgcgguggacuucgggaacuccuacaucgccgagauggagaccgagagcuggaucguggaccggcagugggcccaggaccugacccugcccuggcaguccggcagcggcggggucuggcgcgagaugcaccaccucguggaguucgagcccccgcacgccgccacgauccgggugcuggcgcugggcaaccaggaggggucccucaagaccgcccugaccggcgccaugcgcgucaccaaggacacgaacgacaacaaccuguacaagcuccacgggggccacgugagcugccgggugaagcuguccgcccugacccucaagggcaccagcuacaagaucugcaccgacaagauguucuucgucaagaaccccacggacaccgggcacggcaccguggugaugcaggucaagguguccaagggggcgcccugccgcaucccggugaucgucgccgacgaccugaccgccgccaucaacaagggcauccuggugaccgugaacccgaucgccagcacgaacgacgacgagguccucaucgaggugaacccccccuucggcgacuccuacaucaucguggggcggggcgacagccgccugaccuaccaguggcacaaggagggguccagcaucggcaagcuguucacccagaccaugaagggggucgagcggcuggcggugaugggcgacacggccugggacuucuccagcgccggcggguucuucaccuccgugggcaaggggauccacaccgucuucggcagcgccuuccaggggcuguucggcggccucaacuggaucaccaaggugaucaugggggccgugcugaucugggucggcaucaacacgcgcaacaugaccauguccaugagcaugauccucgugggggugaucaugauguuccugagccugggcgucggggcggaccagggcugcgccaucaacuucggcaagugaggacuagucccuguucccagagcccacuuuuuuuucuuuuuuugaaauaaaauagccugucuuucagaucuaaaaaaaaaaaaaaaaaaaaaaaaaaaaaaaaaaaaaaaaaaaaaaaaaaaaaaaaaaaaaaaaugcaucccccccccccccccccccccccccccccccaaaggcucuuuucagagccaccagaauu

SEQ ID NO: 1265 - RNA, 2368 nt, Artificial Sequence
  mRNA product Design a-4 comprising derived and/or modified sequence from YFV__NC_002031.1__SSjev-prME (polyprotein: aa122-778) (opt1)
gggagacuccugucgggcggaaguaggaggaguagaguuuaaaaacaguacucuuuuuccgguucgggacguaguugaagcaacgacaagccggauaaccgcucuugagacaggaagcuuaccaugggcaagcgcagcgccggguccaucauguggcuggccagccucgcgguggucaucgccugcgccggcgccgugacgcuggugcggaagaaccgcuggcuccugcugaacgucaccuccgaggaccucggcaagaccuucagcguggggaccggcaacugcacgaccaacauccuggaggccaaguacuggugccccgacuccauggaguacaacugcccgaaccugagcccccgggaggagcccgacgacaucgacugcuggugcuacggcguggagaacguccgcguggccuacgggaagugcgacuccgcgggccggagccgccggucccgccgggccaucgaccuccccacccacgagaaccacgggcugaagacccgccaggagaaguggaugacgggccggaugggggagcgccagcugcagaagaucgagcggugguucgugcgcaacccguucuucgccgucaccgcccucaccaucgccuaccuggugggcagcaacaugacccagcggguggucaucgcgcugcucgugcuggccgugggccccgccuacuccgcccacugcaucgggaucacggaccgcgacuucaucgagggcguccacgggggcaccugggugagcgcgacccuggagcaggacaagugcgugaccgucauggcccccgacaagcccucccucgacaucagccuggagacgguggccaucgaccggccggccgaggugcgcaaggucugcuacaacgccgugcugacccacgugaagaucaacgacaagugccccuccaccggcgaggcgcaccucgccgaggagaacgagggggacaacgccugcaagcggaccuacagcgaccggggcugggggaacggcugcgggcuguucggcaagggcuccaucgucgccugcgccaaguucacgugcgcgaaguccaugagccuguucgagguggaccagaccaagauccaguacgucauccgcgcccagcuccacgugggggccaagcaggagaacuggaacaccgacaucaagacccugaaguucgacgcccugagcggcagccaggagguggaguucaucggguacggcaaggccacgcucgagugccagguccagaccgcgguggacuucgggaacuccuacaucgccgagauggagaccgagagcuggaucguggaccggcagugggcccaggaccugacccugcccuggcaguccggcagcggcggggucuggcgcgagaugcaccaccucguggaguucgagcccccgcacgccgccacgauccgggugcuggcgcugggcaaccaggaggggucccucaagaccgcccugaccggcgccaugcgcgucaccaaggacacgaacgacaacaaccuguacaagcuccacgggggccacgugagcugccgggugaagcuguccgcccugacccucaagggcaccagcuacaagaucugcaccgacaagauguucuucgucaagaaccccacggacaccgggcacggcaccguggugaugcaggucaagguguccaagggggcgcccugccgcaucccggugaucgucgccgacgaccugaccgccgccaucaacaagggcauccuggugaccgugaacccgaucgccagcacgaacgacgacgagguccucaucgaggugaacccccccuucggcgacuccuacaucaucguggggcggggcgacagccgccugaccuaccaguggcacaaggagggguccagcaucggcaagcuguucacccagaccaugaagggggucgagcggcuggcggugaugggcgacacggccugggacuucuccagcgccggcggguucuucaccuccgugggcaaggggauccacaccgucuucggcagcgccuuccaggggcuguucggcggccucaacuggaucaccaaggugaucaugggggccgugcugaucugggucggcaucaacacgcgcaacaugaccauguccaugagcaugauccucgugggggugaucaugauguuccugagccugggcgucggggcgugaggacuagucccuguucccagagcccacuuuuuuuucuuuuuuugaaauaaaauagccugucuuucagaucuaaaaaaaaaaaaaaaaaaaaaaaaaaaaaaaaaaaaaaaaaaaaaaaaaaaaaaaaaaaaaaaaugcaucccccccccccccccccccccccccccccccaaaggcucuuuucagagccaccagaauu

SEQ ID NO: 1266 - RNA, 2416 nt, Artificial Sequence
  mRNA product Design a-4 comprising derived and/or modified sequence from YFV__NC_002031.1__X-SS-prME-XX (polyprotein: aa92-788) (opt1)
gggagacuccugucgggcggaaguaggaggaguagaguuuaaaaacaguacucuuuuuccgguucgggacguaguugaagcaacgacaagccggauaaccgcucuugagacaggaagcuuaccaugcgcggccugagcucccggaagcgccggagccacgacgugcucaccguccaguuccugauccuggggaugcuccugaugaccggcggggugacgcuggugcgcaagaaccgguggcuccugcugaacgucaccuccgaggaccucggcaagaccuucagcguggggaccggcaacugcacgaccaacauccuggaggccaaguacuggugccccgacuccauggaguacaacugccccaaccugagcccccgcgaggagcccgacgacaucgacugcuggugcuacggcguggagaacguccggguggccuacgggaagugcgacuccgcgggccgcagccggcgcucccggcgcgccaucgaccuccccacccacgagaaccacgggcugaagacccggcaggagaaguggaugacgggccgcaugggggagcggcagcugcagaagaucgagcgcugguucgugcggaacccguucuucgccgucaccgcccucaccaucgccuaccuggugggcagcaacaugacccagcgcguggucaucgcgcugcucgugcuggccgugggccccgccuacuccgcccacugcaucgggaucacggaccgggacuucaucgagggcguccacgggggcaccugggugagcgcgacccuggagcaggacaagugcgugaccgucauggcccccgacaagcccucccucgacaucagccuggagacgguggccaucgaccgcccggccgaggugcggaaggucugcuacaacgccgugcugacccacgugaagaucaacgacaagugccccuccaccggcgaggcgcaccucgccgaggagaacgagggggacaacgccugcaagcgcaccuacagcgaccgcggcugggggaacggcugcgggcuguucggcaagggcuccaucgucgccugcgccaaguucacgugcgccaagagcaugucccuguucgagguggaccagaccaagauccaguacgucauccgggcgcagcuccacgugggggccaagcaggagaacuggaacaccgacaucaagacccugaaguucgacgcccugagcggcagccaggagguggaguucaucggguacggcaaggccacgcucgagugccagguccagaccgcgguggacuucgggaacuccuacaucgccgagauggagaccgagagcuggaucguggaccgccagugggcccaggaccugacccugcccuggcaguccggcagcggcggggucuggcgggagaugcaccaccucguggaguucgagcccccgcacgccgccacgauccgcgugcuggcgcugggcaaccaggaggggucccucaagaccgcccugaccggcgccaugcgggucaccaaggacacgaacgacaacaaccuguacaagcuccacgggggccacgugagcugccgcgugaagcuguccgcccugacccucaagggcaccagcuacaagaucugcaccgacaagauguucuucgucaagaaccccacggacaccgggcacggcaccguggugaugcaggucaagguguccaagggggcgcccugccggauccccgugaucgucgccgacgaccugaccgccgccaucaacaagggcauccuggugaccgugaacccgaucgccagcacgaacgacgacgagguccucaucgaggugaacccgcccuucggcgacuccuacaucaucguggggcgcggcgacagccggcugaccuaccaguggcacaaggagggguccagcaucggcaagcuguucacccagaccaugaagggggucgagcgccucgcggugaugggcgacacggccugggacuucuccagcgccggcggguucuucaccuccgugggcaaggggauccacaccgucuucggcagcgccuuccaggggcuguucggcggccugaacuggaucaccaaggugaucaugggggccgugcugaucugggucggcaucaacacgcggaacaugaccauguccaugagcaugauccucgugggggugaucaugauguuccugagccugggcgucggggcggaccagggcugcgccaucaacuucggcaagugaggacuagucccuguucccagagcccacuuuuuuuucuuuuuuugaaauaaaauagccugucuuucagaucuaaaaaaaaaaaaaaaaaaaaaaaaaaaaaaaaaaaaaaaaaaaaaaaaaaaaaaaaaaaaaaaaugcaucccccccccccccccccccccccccccccccaaaggcucuuuucagagccaccagaauu

SEQ ID NO: 1267 - RNA, 2353 nt, Artificial Sequence
  mRNA product Design a-4 comprising derived and/or modified sequence from YFV__NC_002031.1__SS-prME (polyprotein: M,aa104-778) (opt1)
gggagacuccugucgggcggaaguaggaggaguagaguuuaaaaacaguacucuuuuuccgguucgggacguaguugaagcaacgacaagccggauaaccgcucuugagacaggaagcuuaccauggacgugcugaccguccaguuccucauccugggcaugcugcucaugaccgggggcgugacgcuggugcgcaagaaccgguggcugcuccugaacgucaccagcgaggaccuggggaagaccuucuccgugggcaccgggaacugcacgaccaacauccucgaggccaaguacuggugccccgacagcauggaguacaacugccccaaccugagcccccgcgaggagcccgacgacaucgacugcuggugcuacggcguggagaacguccggguggccuacggcaagugcgacuccgcggggcgcucccggcgcagccggcgcgccaucgaccugcccacccacgagaaccacggccucaagacccggcaggagaaguggaugacggggcgcaugggcgagcggcagcugcagaagaucgagcgcugguucgugcggaacccguucuucgccgucaccgcccugaccaucgccuaccucgugggguccaacaugacccagcgcguggucaucgcgcugcuggugcucgccgugggccccgccuacagcgcccacugcaucggcaucacggaccgggacuucaucgaggggguccacggcgggaccuggguguccgcgacccuggagcaggacaagugcgugaccgucauggcccccgacaagcccagccuggacaucucccucgagacgguggccaucgaccgcccggccgaggugcggaaggucugcuacaacgccgugcugacccacgugaagaucaacgacaagugccccagcaccggcgaggcgcaccuggccgaggagaacgagggcgacaacgccugcaagcgcaccuacuccgaccggggguggggcaacgggugcggccucuucgggaagggcagcaucgucgccugcgccaaguucacgugcgcgaaguccaugagccuguucgagguggaccagaccaagauccaguacgucauccgcgcccagcugcacgugggcgccaagcaggagaacuggaacaccgacaucaagacccucaaguucgacgcccuguccgggagccaggagguggaguucaucggcuacgggaaggccacgcuggagugccagguccagaccgcgguggacuucggcaacuccuacaucgccgagauggagaccgagagcuggaucguggaccggcagugggcccaggaccucacccugcccuggcagagcggguccggcggcgucuggcgcgagaugcaccaccugguggaguucgagcccccgcacgccgccacgauccgcgugcucgcgcuggggaaccaggagggcagccugaagaccgcccucaccggggccaugcgggucaccaaggacacgaacgacaacaaccuguacaagcugcacggcgggcacguguccugccgcgugaagcucagcgcccugacccugaagggcaccuccuacaagaucugcaccgacaagauguucuucgucaagaaccccacggacaccggccacgggaccguggugaugcaggucaaggugagcaagggcgcgcccugccggauccccgugaucgucgccgacgaccucaccgccgccaucaacaaggggauccuggugaccgugaacccgaucgccuccacgaacgacgacgagguccugaucgaggugaacccgcccuucggcgacagcuacaucaucgugggccgcggggacucccggcucaccuaccaguggcacaaggagggcagcuccaucgggaagcuguucacccagaccaugaagggcgucgagcgccuggcggugaugggggacacggccugggacuucagcuccgccggcggcuucuucaccagcguggggaagggcauccacaccgucuucggguccgccuuccagggccucuucgggggccugaacuggaucaccaaggugaucaugggcgccgugcugaucugggucgggaucaacacgcggaacaugaccaugagcauguccaugauccuggugggcgugaucaugauguuccucagccugggggucggcgcgugaggacuagucccuguucccagagcccacuuuuuuuucuuuuuuugaaauaaaauagccugucuuucagaucuaaaaaaaaaaaaaaaaaaaaaaaaaaaaaaaaaaaaaaaaaaaaaaaaaaaaaaaaaaaaaaaaugcaucccccccccccccccccccccccccccccccaaaggcucuuuucagagccaccagaauu

SEQ ID NO: 1268 - RNA, 2380 nt, Artificial Sequence
  mRNA product Design a-4 comprising derived and/or modified sequence from YFV__NC_002031.1__SSIgE-prME-XX (polyprotein: aa122-788) (opt1)
gggagacuccugucgggcggaaguaggaggaguagaguuuaaaaacaguacucuuuuuccgguucgggacguaguugaagcaacgacaagccggauaaccgcucuugagacaggaagcuuaccauggacuggaccuggauccuguuccucguggccgccgcgacccgcguccacagcgugacgcuggugcggaagaaccgcuggcugcuccugaacgucaccuccgaggaccugggcaagaccuucagcguggggaccggcaacugcacgaccaacauccucgaggccaaguacuggugccccgacuccauggaguacaacugccccaaccugagcccccgggaggagcccgacgacaucgacugcuggugcuacgggguggagaacguccgcguggccuacggcaagugcgacuccgccgggcggagccgccggucccgccgggccaucgaccugcccacccacgagaaccacggccucaagacccgccaggagaaguggaugacgggccggaugggggagcgccagcugcagaagaucgagcggugguucgugcgcaacccguucuucgcggucaccgcccugaccaucgccuaccucgugggcagcaacaugacccagcggguggucaucgcccugcuggugcucgcgguggggcccgccuacuccgcccacugcaucggcaucacggaccgcgacuucaucgaggggguccacggcggcaccugggugagcgccacccuggagcaggacaagugcgugaccgucauggcccccgacaagcccucccuggacaucagccucgagacgguggcgaucgaccggccggccgaggugcgcaaggucugcuacaacgccgugcugacccacgugaagaucaacgacaagugccccuccaccggggaggcccaccuggccgaggagaacgagggcgacaacgcgugcaagcggaccuacagcgaccgcggguggggcaacggcugcggccucuucgggaagggguccaucgucgccugcgccaaguucacgugcgccaagagcaugucccuguucgagguggaccagaccaagauccaguacgucauccgggcccagcugcacgugggcgcgaagcaggagaacuggaacaccgacaucaagacccucaaguucgacgcccugagcgggucccaggagguggaguucaucggcuacggcaaggccacgcuggagugccagguccagaccgccguggacuucgggaacagcuacaucgccgagauggagaccgagagcuggaucguggaccgccagugggcgcaggaccucacccugcccuggcaguccggcagcgggggcgucuggcgcgagaugcaccaccugguggaguucgagcccccgcacgccgccacgauccgggugcucgcccuggggaaccaggagggcucccugaagaccgcgcucaccggcgccaugcgcgucaccaaggacacgaacgacaacaaccuguacaagcugcacgggggccacgugagcugccgggugaagcucuccgcccugacccugaaggggaccagcuacaagaucugcaccgacaagauguucuucgucaagaaccccacggacaccggccacgggaccguggugaugcaggucaagguguccaagggcgcccccugccgcauccccgugaucgucgccgacgaccucaccgcggccaucaacaagggcauccuggugaccgugaacccgaucgccagcacgaacgacgacgagguccugaucgaggugaacccgcccuucggggacuccuacaucaucgugggccgcggggacagccggcucaccuaccaguggcacaaggagggcuccagcaucggcaagcuguucacccagaccaugaagggggucgagcggcuggccgugaugggcgacacggccugggacuucuccagcgccgggggcuucuucaccuccguggggaagggcauccacaccgucuucggcagcgcguuccaggggcuguucggcgggcucaacuggaucaccaaggugaucaugggcgccgugcugaucugggucgggaucaacacgcgcaacaugaccauguccaugagcaugauccucgugggcgugaucaugauguuccugucccugggcgucggggccgaccagggcugcgccaucaacuucgggaagugaggacuagucccuguucccagagcccacuuuuuuuucuuuuuuugaaauaaaauagccugucuuucagaucuaaaaaaaaaaaaaaaaaaaaaaaaaaaaaaaaaaaaaaaaaaaaaaaaaaaaaaaaaaaaaaaaugcaucccccccccccccccccccccccccccccccaaaggcucuuuucagagccaccagaauu

SEQ ID NO: 1269 - RNA, 2350 nt, Artificial Sequence
  mRNA product Design a-4 comprising derived and/or modified sequence from YFV__NC_002031.1__SSIgE-prME (polyprotein: aa122-778) (opt1)
gggagacuccugucgggcggaaguaggaggaguagaguuuaaaaacaguacucuuuuuccgguucgggacguaguugaagcaacgacaagccggauaaccgcucuugagacaggaagcuuaccauggacuggaccuggauccuguuccucguggccgccgcgacccgcguccacagcgugacgcuggugcggaagaaccgcuggcugcuccugaacgucaccuccgaggaccugggcaagaccuucagcguggggaccggcaacugcacgaccaacauccucgaggccaaguacuggugccccgacuccauggaguacaacugccccaaccugagcccccgggaggagcccgacgacaucgacugcuggugcuacgggguggagaacguccgcguggccuacggcaagugcgacuccgccgggcggagccgccggucccgccgggccaucgaccugcccacccacgagaaccacggccucaagacccgccaggagaaguggaugacgggccggaugggggagcgccagcugcagaagaucgagcggugguucgugcgcaacccguucuucgcggucaccgcccugaccaucgccuaccucgugggcagcaacaugacccagcggguggucaucgcccugcuggugcucgcgguggggcccgccuacuccgcccacugcaucggcaucacggaccgcgacuucaucgaggggguccacggcggcaccugggugagcgccacccuggagcaggacaagugcgugaccgucauggcccccgacaagcccucccuggacaucagccucgagacgguggcgaucgaccggccggccgaggugcgcaaggucugcuacaacgccgugcugacccacgugaagaucaacgacaagugccccuccaccggggaggcccaccuggccgaggagaacgagggcgacaacgcgugcaagcggaccuacagcgaccgcggguggggcaacggcugcggccucuucgggaagggguccaucgucgccugcgccaaguucacgugcgccaagagcaugucccuguucgagguggaccagaccaagauccaguacgucauccgggcccagcugcacgugggcgcgaagcaggagaacuggaacaccgacaucaagacccucaaguucgacgcccugagcgggucccaggagguggaguucaucggcuacggcaaggccacgcuggagugccagguccagaccgccguggacuucgggaacagcuacaucgccgagauggagaccgagagcuggaucguggaccgccagugggcgcaggaccucacccugcccuggcaguccggcagcgggggcgucuggcgcgagaugcaccaccugguggaguucgagcccccgcacgccgccacgauccgggugcucgcccuggggaaccaggagggcucccugaagaccgcgcucaccggcgccaugcgcgucaccaaggacacgaacgacaacaaccuguacaagcugcacgggggccacgugagcugccgggugaagcucuccgcccugacccugaaggggaccagcuacaagaucugcaccgacaagauguucuucgucaagaaccccacggacaccggccacgggaccguggugaugcaggucaagguguccaagggcgcccccugccgcauccccgugaucgucgccgacgaccucaccgcggccaucaacaagggcauccuggugaccgugaacccgaucgccagcacgaacgacgacgagguccugaucgaggugaacccgcccuucggggacuccuacaucaucgugggccgcggggacagccggcucaccuaccaguggcacaaggagggcuccagcaucggcaagcuguucacccagaccaugaagggggucgagcggcuggccgugaugggcgacacggccugggacuucuccagcgccgggggcuucuucaccuccguggggaagggcauccacaccgucuucggcagcgcguuccaggggcuguucggcgggcucaacuggaucaccaaggugaucaugggcgccgugcugaucugggucgggaucaacacgcgcaacaugaccauguccaugagcaugauccucgugggcgugaucaugauguuccugucccugggcgucggggccugaggacuagucccuguucccagagcccacuuuuuuuucuuuuuuugaaauaaaauagccugucuuucagaucuaaaaaaaaaaaaaaaaaaaaaaaaaaaaaaaaaaaaaaaaaaaaaaaaaaaaaaaaaaaaaaaaugcaucccccccccccccccccccccccccccccccaaaggcucuuuucagagccaccagaauu

SEQ ID NO: 1270 - RNA, 2398 nt, Artificial Sequence
  mRNA product Design a-4 comprising derived and/or modified sequence from YFV__NC_002031.1__SSjev-prME-XX (polyprotein: aa122-788) (opt1)
gggagacuccugucgggcggaaguaggaggaguagaguuuaaaaacaguacucuuuuuccgguucgggacguaguugaagcaacgacaagccggauaaccgcucuugagacaggaagcuuaccaugggcaagcgcagcgccggguccaucauguggcuggccagccucgcgguggucaucgccugcgccggcgccgugacccuggugcggaagaaccgcuggcugcuccugaacgucaccuccgaggaccuggggaagacguucagcgugggcaccgggaacugcaccaccaacauccucgaggccaaguacuggugccccgacuccauggaguacaacugccccaaccugagcccccgggaggagcccgacgacaucgacugcuggugcuacggcguggagaacguccgcguggcguacggcaagugcgacuccgccgggcggagccgccggucccgccgggccaucgaccugcccacgcacgagaaccacggccucaagacccgccaggagaaguggaugaccgggcggaugggcgagcgccagcugcagaagaucgagcggugguucgugcgcaacccguucuucgccgucaccgcgcugacgaucgccuaccucguggggagcaacaugacccagcggguggucaucgcccugcuggugcucgccgugggccccgccuacuccgcgcacugcaucggcaucaccgaccgcgacuucaucgaggggguccacggcgggaccugggugagcgccacgcuggagcaggacaagugcgugaccgucauggcccccgacaagcccucccuggacaucagccucgagaccguggccaucgaccggccggccgaggugcgcaaggucugcuacaacgcggugcugacccacgugaagaucaacgacaagugccccuccacgggcgaggcccaccuggccgaggagaacgagggcgacaacgccugcaagcggaccuacagcgaccgcggguggggcaacgggugcggccucuucgggaagggcuccaucgucgccugcgcgaaguucacgugcgccaagagcaugucccuguucgagguggaccagaccaagauccaguacgucauccgggcccagcugcacgugggcgccaagcaggagaacuggaacaccgacaucaagacccucaaguucgacgcccugagcgggagccaggagguggaguucaucggcuacgggaaggcgacccuggagugccagguccagaccgccguggacuucggcaacuccuacaucgccgagauggagacggagagcuggaucguggaccgccagugggcccaggaccucacccugcccuggcaguccgggagcggcggcgucuggcgcgagaugcaccaccugguggaguucgagcccccgcacgcggccaccauccgggugcucgcccuggggaaccaggagggcucccugaagaccgcccucacgggggccaugcgcgucaccaaggacaccaacgacaacaaccuguacaagcugcacggcgggcacgugagcugccgggugaagcucuccgcgcugacccugaagggcacgagcuacaagaucugcaccgacaagauguucuucgucaagaaccccaccgacaccggccacgggacgguggugaugcaggucaagguguccaagggcgcccccugccgcauccccgugaucgucgccgacgaccucaccgccgccaucaacaaggggauccuggugaccgugaacccgaucgcgagcaccaacgacgacgagguccugaucgaggugaacccgcccuucggcgacuccuacaucaucgugggccgcggggacagccggcucaccuaccaguggcacaaggagggcuccagcaucgggaagcuguucacgcagaccaugaagggcgucgagcggcuggccgugaugggggacaccgccugggacuucuccagcgccggcggcuucuucaccuccguggggaagggcauccacacggucuucgggagcgccuuccagggccucuucgggggccugaacuggaucaccaaggugaucaugggcgcggugcugaucugggucgggaucaacacccgcaacaugaccauguccaugagcaugauccucgugggcgugaucaugauguuccugagccugggggucggcgccgaccaggggugcgccaucaacuucggcaagugaggacuagucccuguucccagagcccacuuuuuuuucuuuuuuugaaauaaaauagccugucuuucagaucuaaaaaaaaaaaaaaaaaaaaaaaaaaaaaaaaaaaaaaaaaaaaaaaaaaaaaaaaaaaaaaaaugcaucccccccccccccccccccccccccccccccaaaggcucuuuucagagccaccagaauu

SEQ ID NO: 1271 - RNA, 2368 nt, Artificial Sequence
  mRNA product Design a-4 comprising derived and/or modified sequence from YFV__NC_002031.1__SSjev-prME (polyprotein: aa122-778) (opt1)
gggagacuccugucgggcggaaguaggaggaguagaguuuaaaaacaguacucuuuuuccgguucgggacguaguugaagcaacgacaagccggauaaccgcucuugagacaggaagcuuaccaugggcaagcgcagcgccggguccaucauguggcuggccagccucgcgguggucaucgccugcgccggcgccgugacccuggugcggaagaaccgcuggcugcuccugaacgucaccuccgaggaccuggggaagacguucagcgugggcaccgggaacugcaccaccaacauccucgaggccaaguacuggugccccgacuccauggaguacaacugccccaaccugagcccccgggaggagcccgacgacaucgacugcuggugcuacggcguggagaacguccgcguggcguacggcaagugcgacuccgccgggcggagccgccggucccgccgggccaucgaccugcccacgcacgagaaccacggccucaagacccgccaggagaaguggaugaccgggcggaugggcgagcgccagcugcagaagaucgagcggugguucgugcgcaacccguucuucgccgucaccgcgcugacgaucgccuaccucguggggagcaacaugacccagcggguggucaucgcccugcuggugcucgccgugggccccgccuacuccgcgcacugcaucggcaucaccgaccgcgacuucaucgaggggguccacggcgggaccugggugagcgccacgcuggagcaggacaagugcgugaccgucauggcccccgacaagcccucccuggacaucagccucgagaccguggccaucgaccggccggccgaggugcgcaaggucugcuacaacgcggugcugacccacgugaagaucaacgacaagugccccuccacgggcgaggcccaccuggccgaggagaacgagggcgacaacgccugcaagcggaccuacagcgaccgcggguggggcaacgggugcggccucuucgggaagggcuccaucgucgccugcgcgaaguucacgugcgccaagagcaugucccuguucgagguggaccagaccaagauccaguacgucauccgggcccagcugcacgugggcgccaagcaggagaacuggaacaccgacaucaagacccucaaguucgacgcccugagcgggagccaggagguggaguucaucggcuacgggaaggcgacccuggagugccagguccagaccgccguggacuucggcaacuccuacaucgccgagauggagacggagagcuggaucguggaccgccagugggcccaggaccucacccugcccuggcaguccgggagcggcggcgucuggcgcgagaugcaccaccugguggaguucgagcccccgcacgcggccaccauccgggugcucgcccuggggaaccaggagggcucccugaagaccgcccucacgggggccaugcgcgucaccaaggacaccaacgacaacaaccuguacaagcugcacggcgggcacgugagcugccgggugaagcucuccgcgcugacccugaagggcacgagcuacaagaucugcaccgacaagauguucuucgucaagaaccccaccgacaccggccacgggacgguggugaugcaggucaagguguccaagggcgcccccugccgcauccccgugaucgucgccgacgaccucaccgccgccaucaacaaggggauccuggugaccgugaacccgaucgcgagcaccaacgacgacgagguccugaucgaggugaacccgcccuucggcgacuccuacaucaucgugggccgcggggacagccggcucaccuaccaguggcacaaggagggcuccagcaucgggaagcuguucacgcagaccaugaagggcgucgagcggcuggccgugaugggggacaccgccugggacuucuccagcgccggcggcuucuucaccuccguggggaagggcauccacacggucuucgggagcgccuuccagggccucuucgggggccugaacuggaucaccaaggugaucaugggcgcggugcugaucugggucgggaucaacacccgcaacaugaccauguccaugagcaugauccucgugggcgugaucaugauguuccugagccugggggucggcgccugaggacuagucccuguucccagagcccacuuuuuuuucuuuuuuugaaauaaaauagccugucuuucagaucuaaaaaaaaaaaaaaaaaaaaaaaaaaaaaaaaaaaaaaaaaaaaaaaaaaaaaaaaaaaaaaaaugcaucccccccccccccccccccccccccccccccaaaggcucuuuucagagccaccagaauu

SEQ ID NO: 1272 - RNA, 2416 nt, Artificial Sequence
  mRNA product Design a-4 comprising derived and/or modified sequence from YFV__NC_002031.1__X-SS-prME-XX (polyprotein: aa92-788) (opt2)
gggagacuccugucgggcggaaguaggaggaguagaguuuaaaaacaguacucuuuuuccgguucgggacguaguugaagcaacgacaagccggauaaccgcucuugagacaggaagcuuaccaugcgcggccucuccucccgcaagcgccgcucccacgacguccucaccguccaguuccucauccucggcaugcuccucaugaccggcggcgucacccucguccgcaagaaccgcuggcuccuccucaacgucaccuccgaggaccucggcaagaccuucuccgucggcaccggcaacugcaccaccaacauccucgaggccaaguacuggugccccgacuccauggaguacaacugccccaaccucuccccccgcgaggagcccgacgacaucgacugcuggugcuacggcgucgagaacguccgcgucgccuacggcaagugcgacuccgccggccgcucccgccgcucccgccgcgccaucgaccuccccacccacgagaaccacggccucaagacccgccaggagaaguggaugaccggccgcaugggcgagcgccagcuccagaagaucgagcgcugguucguccgcaaccccuucuucgccgucaccgcccucaccaucgccuaccucgucggcuccaacaugacccagcgcgucgucaucgcccuccucguccucgccgucggccccgccuacuccgcccacugcaucggcaucaccgaccgcgacuucaucgagggcguccacggcggcaccugggucuccgccacccucgagcaggacaagugcgucaccgucauggcccccgacaagcccucccucgacaucucccucgagaccgucgccaucgaccgccccgccgagguccgcaaggucugcuacaacgccguccucacccacgucaagaucaacgacaagugccccuccaccggcgaggcccaccucgccgaggagaacgagggcgacaacgccugcaagcgcaccuacuccgaccgcggcuggggcaacggcugcggccucuucggcaagggcuccaucgucgccugcgccaaguucaccugcgccaaguccaugucccucuucgaggucgaccagaccaagauccaguacgucauccgcgcccagcuccacgucggcgccaagcaggagaacuggaacaccgacaucaagacccucaaguucgacgcccucuccggcucccaggaggucgaguucaucggcuacggcaaggccacccucgagugccagguccagaccgccgucgacuucggcaacuccuacaucgccgagauggagaccgaguccuggaucgucgaccgccagugggcccaggaccucacccuccccuggcaguccggcuccggcggcgucuggcgcgagaugcaccaccucgucgaguucgagcccccccacgccgccaccauccgcguccucgcccucggcaaccaggagggcucccucaagaccgcccucaccggcgccaugcgcgucaccaaggacaccaacgacaacaaccucuacaagcuccacggcggccacgucuccugccgcgucaagcucuccgcccucacccucaagggcaccuccuacaagaucugcaccgacaagauguucuucgucaagaaccccaccgacaccggccacggcaccgucgucaugcaggucaaggucuccaagggcgcccccugccgcauccccgucaucgucgccgacgaccucaccgccgccaucaacaagggcauccucgucaccgucaaccccaucgccuccaccaacgacgacgagguccucaucgaggucaacccccccuucggcgacuccuacaucaucgucggccgcggcgacucccgccucaccuaccaguggcacaaggagggcuccuccaucggcaagcucuucacccagaccaugaagggcgucgagcgccucgccgucaugggcgacaccgccugggacuucuccuccgccggcggcuucuucaccuccgucggcaagggcauccacaccgucuucggcuccgccuuccagggccucuucggcggccucaacuggaucaccaaggucaucaugggcgccguccucaucugggucggcaucaacacccgcaacaugaccauguccauguccaugauccucgucggcgucaucaugauguuccucucccucggcgucggcgccgaccagggcugcgccaucaacuucggcaagugaggacuagucccuguucccagagcccacuuuuuuuucuuuuuuugaaauaaaauagccugucuuucagaucuaaaaaaaaaaaaaaaaaaaaaaaaaaaaaaaaaaaaaaaaaaaaaaaaaaaaaaaaaaaaaaaaugcaucccccccccccccccccccccccccccccccaaaggcucuuuucagagccaccagaauu

SEQ ID NO: 1273 - RNA, 2353 nt, Artificial Sequence
  mRNA product Design a-4 comprising derived and/or modified sequence from YFV__NC_002031.1__SS-prME (polyprotein: M,aa104-778) (opt2)
gggagacuccugucgggcggaaguaggaggaguagaguuuaaaaacaguacucuuuuuccgguucgggacguaguugaagcaacgacaagccggauaaccgcucuugagacaggaagcuuaccauggacguccucaccguccaguuccucauccucggcaugcuccucaugaccggcggcgucacccucguccgcaagaaccgcuggcuccuccucaacgucaccuccgaggaccucggcaagaccuucuccgucggcaccggcaacugcaccaccaacauccucgaggccaaguacuggugccccgacuccauggaguacaacugccccaaccucuccccccgcgaggagcccgacgacaucgacugcuggugcuacggcgucgagaacguccgcgucgccuacggcaagugcgacuccgccggccgcucccgccgcucccgccgcgccaucgaccuccccacccacgagaaccacggccucaagacccgccaggagaaguggaugaccggccgcaugggcgagcgccagcuccagaagaucgagcgcugguucguccgcaaccccuucuucgccgucaccgcccucaccaucgccuaccucgucggcuccaacaugacccagcgcgucgucaucgcccuccucguccucgccgucggccccgccuacuccgcccacugcaucggcaucaccgaccgcgacuucaucgagggcguccacggcggcaccugggucuccgccacccucgagcaggacaagugcgucaccgucauggcccccgacaagcccucccucgacaucucccucgagaccgucgccaucgaccgccccgccgagguccgcaaggucugcuacaacgccguccucacccacgucaagaucaacgacaagugccccuccaccggcgaggcccaccucgccgaggagaacgagggcgacaacgccugcaagcgcaccuacuccgaccgcggcuggggcaacggcugcggccucuucggcaagggcuccaucgucgccugcgccaaguucaccugcgccaaguccaugucccucuucgaggucgaccagaccaagauccaguacgucauccgcgcccagcuccacgucggcgccaagcaggagaacuggaacaccgacaucaagacccucaaguucgacgcccucuccggcucccaggaggucgaguucaucggcuacggcaaggccacccucgagugccagguccagaccgccgucgacuucggcaacuccuacaucgccgagauggagaccgaguccuggaucgucgaccgccagugggcccaggaccucacccuccccuggcaguccggcuccggcggcgucuggcgcgagaugcaccaccucgucgaguucgagcccccccacgccgccaccauccgcguccucgcccucggcaaccaggagggcucccucaagaccgcccucaccggcgccaugcgcgucaccaaggacaccaacgacaacaaccucuacaagcuccacggcggccacgucuccugccgcgucaagcucuccgcccucacccucaagggcaccuccuacaagaucugcaccgacaagauguucuucgucaagaaccccaccgacaccggccacggcaccgucgucaugcaggucaaggucuccaagggcgcccccugccgcauccccgucaucgucgccgacgaccucaccgccgccaucaacaagggcauccucgucaccgucaaccccaucgccuccaccaacgacgacgagguccucaucgaggucaacccccccuucggcgacuccuacaucaucgucggccgcggcgacucccgccucaccuaccaguggcacaaggagggcuccuccaucggcaagcucuucacccagaccaugaagggcgucgagcgccucgccgucaugggcgacaccgccugggacuucuccuccgccggcggcuucuucaccuccgucggcaagggcauccacaccgucuucggcuccgccuuccagggccucuucggcggccucaacuggaucaccaaggucaucaugggcgccguccucaucugggucggcaucaacacccgcaacaugaccauguccauguccaugauccucgucggcgucaucaugauguuccucucccucggcgucggcgccugaggacuagucccuguucccagagcccacuuuuuuuucuuuuuuugaaauaaaauagccugucuuucagaucuaaaaaaaaaaaaaaaaaaaaaaaaaaaaaaaaaaaaaaaaaaaaaaaaaaaaaaaaaaaaaaaaugcaucccccccccccccccccccccccccccccccaaaggcucuuuucagagccaccagaauu

SEQ ID NO: 1274 - RNA, 2380 nt, Artificial Sequence
  mRNA product Design a-4 comprising derived and/or modified sequence from YFV__NC_002031.1__SSIgE-prME-XX (polyprotein: aa122-788) (opt2)
gggagacuccugucgggcggaaguaggaggaguagaguuuaaaaacaguacucuuuuuccgguucgggacguaguugaagcaacgacaagccggauaaccgcucuugagacaggaagcuuaccauggacuggaccuggauccucuuccucgucgccgccgccacccgcguccacuccgucacccucguccgcaagaaccgcuggcuccuccucaacgucaccuccgaggaccucggcaagaccuucuccgucggcaccggcaacugcaccaccaacauccucgaggccaaguacuggugccccgacuccauggaguacaacugccccaaccucuccccccgcgaggagcccgacgacaucgacugcuggugcuacggcgucgagaacguccgcgucgccuacggcaagugcgacuccgccggccgcucccgccgcucccgccgcgccaucgaccuccccacccacgagaaccacggccucaagacccgccaggagaaguggaugaccggccgcaugggcgagcgccagcuccagaagaucgagcgcugguucguccgcaaccccuucuucgccgucaccgcccucaccaucgccuaccucgucggcuccaacaugacccagcgcgucgucaucgcccuccucguccucgccgucggccccgccuacuccgcccacugcaucggcaucaccgaccgcgacuucaucgagggcguccacggcggcaccugggucuccgccacccucgagcaggacaagugcgucaccgucauggcccccgacaagcccucccucgacaucucccucgagaccgucgccaucgaccgccccgccgagguccgcaaggucugcuacaacgccguccucacccacgucaagaucaacgacaagugccccuccaccggcgaggcccaccucgccgaggagaacgagggcgacaacgccugcaagcgcaccuacuccgaccgcggcuggggcaacggcugcggccucuucggcaagggcuccaucgucgccugcgccaaguucaccugcgccaaguccaugucccucuucgaggucgaccagaccaagauccaguacgucauccgcgcccagcuccacgucggcgccaagcaggagaacuggaacaccgacaucaagacccucaaguucgacgcccucuccggcucccaggaggucgaguucaucggcuacggcaaggccacccucgagugccagguccagaccgccgucgacuucggcaacuccuacaucgccgagauggagaccgaguccuggaucgucgaccgccagugggcccaggaccucacccuccccuggcaguccggcuccggcggcgucuggcgcgagaugcaccaccucgucgaguucgagcccccccacgccgccaccauccgcguccucgcccucggcaaccaggagggcucccucaagaccgcccucaccggcgccaugcgcgucaccaaggacaccaacgacaacaaccucuacaagcuccacggcggccacgucuccugccgcgucaagcucuccgcccucacccucaagggcaccuccuacaagaucugcaccgacaagauguucuucgucaagaaccccaccgacaccggccacggcaccgucgucaugcaggucaaggucuccaagggcgcccccugccgcauccccgucaucgucgccgacgaccucaccgccgccaucaacaagggcauccucgucaccgucaaccccaucgccuccaccaacgacgacgagguccucaucgaggucaacccccccuucggcgacuccuacaucaucgucggccgcggcgacucccgccucaccuaccaguggcacaaggagggcuccuccaucggcaagcucuucacccagaccaugaagggcgucgagcgccucgccgucaugggcgacaccgccugggacuucuccuccgccggcggcuucuucaccuccgucggcaagggcauccacaccgucuucggcuccgccuuccagggccucuucggcggccucaacuggaucaccaaggucaucaugggcgccguccucaucugggucggcaucaacacccgcaacaugaccauguccauguccaugauccucgucggcgucaucaugauguuccucucccucggcgucggcgccgaccagggcugcgccaucaacuucggcaagugaggacuagucccuguucccagagcccacuuuuuuuucuuuuuuugaaauaaaauagccugucuuucagaucuaaaaaaaaaaaaaaaaaaaaaaaaaaaaaaaaaaaaaaaaaaaaaaaaaaaaaaaaaaaaaaaaugcaucccccccccccccccccccccccccccccccaaaggcucuuuucagagccaccagaauu

SEQ ID NO: 1275 - RNA, 2350 nt, Artificial Sequence
  mRNA product Design a-4 comprising derived and/or modified sequence from YFV__NC_002031.1__SSIgE-prME (polyprotein: aa122-778) (opt2)
gggagacuccugucgggcggaaguaggaggaguagaguuuaaaaacaguacucuuuuuccgguucgggacguaguugaagcaacgacaagccggauaaccgcucuugagacaggaagcuuaccauggacuggaccuggauccucuuccucgucgccgccgccacccgcguccacuccgucacccucguccgcaagaaccgcuggcuccuccucaacgucaccuccgaggaccucggcaagaccuucuccgucggcaccggcaacugcaccaccaacauccucgaggccaaguacuggugccccgacuccauggaguacaacugccccaaccucuccccccgcgaggagcccgacgacaucgacugcuggugcuacggcgucgagaacguccgcgucgccuacggcaagugcgacuccgccggccgcucccgccgcucccgccgcgccaucgaccuccccacccacgagaaccacggccucaagacccgccaggagaaguggaugaccggccgcaugggcgagcgccagcuccagaagaucgagcgcugguucguccgcaaccccuucuucgccgucaccgcccucaccaucgccuaccucgucggcuccaacaugacccagcgcgucgucaucgcccuccucguccucgccgucggccccgccuacuccgcccacugcaucggcaucaccgaccgcgacuucaucgagggcguccacggcggcaccugggucuccgccacccucgagcaggacaagugcgucaccgucauggcccccgacaagcccucccucgacaucucccucgagaccgucgccaucgaccgccccgccgagguccgcaaggucugcuacaacgccguccucacccacgucaagaucaacgacaagugccccuccaccggcgaggcccaccucgccgaggagaacgagggcgacaacgccugcaagcgcaccuacuccgaccgcggcuggggcaacggcugcggccucuucggcaagggcuccaucgucgccugcgccaaguucaccugcgccaaguccaugucccucuucgaggucgaccagaccaagauccaguacgucauccgcgcccagcuccacgucggcgccaagcaggagaacuggaacaccgacaucaagacccucaaguucgacgcccucuccggcucccaggaggucgaguucaucggcuacggcaaggccacccucgagugccagguccagaccgccgucgacuucggcaacuccuacaucgccgagauggagaccgaguccuggaucgucgaccgccagugggcccaggaccucacccuccccuggcaguccggcuccggcggcgucuggcgcgagaugcaccaccucgucgaguucgagcccccccacgccgccaccauccgcguccucgcccucggcaaccaggagggcucccucaagaccgcccucaccggcgccaugcgcgucaccaaggacaccaacgacaacaaccucuacaagcuccacggcggccacgucuccugccgcgucaagcucuccgcccucacccucaagggcaccuccuacaagaucugcaccgacaagauguucuucgucaagaaccccaccgacaccggccacggcaccgucgucaugcaggucaaggucuccaagggcgcccccugccgcauccccgucaucgucgccgacgaccucaccgccgccaucaacaagggcauccucgucaccgucaaccccaucgccuccaccaacgacgacgagguccucaucgaggucaacccccccuucggcgacuccuacaucaucgucggccgcggcgacucccgccucaccuaccaguggcacaaggagggcuccuccaucggcaagcucuucacccagaccaugaagggcgucgagcgccucgccgucaugggcgacaccgccugggacuucuccuccgccggcggcuucuucaccuccgucggcaagggcauccacaccgucuucggcuccgccuuccagggccucuucggcggccucaacuggaucaccaaggucaucaugggcgccguccucaucugggucggcaucaacacccgcaacaugaccauguccauguccaugauccucgucggcgucaucaugauguuccucucccucggcgucggcgccugaggacuagucccuguucccagagcccacuuuuuuuucuuuuuuugaaauaaaauagccugucuuucagaucuaaaaaaaaaaaaaaaaaaaaaaaaaaaaaaaaaaaaaaaaaaaaaaaaaaaaaaaaaaaaaaaaugcaucccccccccccccccccccccccccccccccaaaggcucuuuucagagccaccagaauu

SEQ ID NO: 1276 - RNA, 2398 nt, Artificial Sequence
  mRNA product Design a-4 comprising derived and/or modified sequence from YFV__NC_002031.1__SSjev-prME-XX (polyprotein: aa122-788) (opt2)
gggagacuccugucgggcggaaguaggaggaguagaguuuaaaaacaguacucuuuuuccgguucgggacguaguugaagcaacgacaagccggauaaccgcucuugagacaggaagcuuaccaugggcaagcgcuccgccggcuccaucauguggcucgccucccucgccgucgucaucgccugcgccggcgccgucacccucguccgcaagaaccgcuggcuccuccucaacgucaccuccgaggaccucggcaagaccuucuccgucggcaccggcaacugcaccaccaacauccucgaggccaaguacuggugccccgacuccauggaguacaacugccccaaccucuccccccgcgaggagcccgacgacaucgacugcuggugcuacggcgucgagaacguccgcgucgccuacggcaagugcgacuccgccggccgcucccgccgcucccgccgcgccaucgaccuccccacccacgagaaccacggccucaagacccgccaggagaaguggaugaccggccgcaugggcgagcgccagcuccagaagaucgagcgcugguucguccgcaaccccuucuucgccgucaccgcccucaccaucgccuaccucgucggcuccaacaugacccagcgcgucgucaucgcccuccucguccucgccgucggccccgccuacuccgcccacugcaucggcaucaccgaccgcgacuucaucgagggcguccacggcggcaccugggucuccgccacccucgagcaggacaagugcgucaccgucauggcccccgacaagcccucccucgacaucucccucgagaccgucgccaucgaccgccccgccgagguccgcaaggucugcuacaacgccguccucacccacgucaagaucaacgacaagugccccuccaccggcgaggcccaccucgccgaggagaacgagggcgacaacgccugcaagcgcaccuacuccgaccgcggcuggggcaacggcugcggccucuucggcaagggcuccaucgucgccugcgccaaguucaccugcgccaaguccaugucccucuucgaggucgaccagaccaagauccaguacgucauccgcgcccagcuccacgucggcgccaagcaggagaacuggaacaccgacaucaagacccucaaguucgacgcccucuccggcucccaggaggucgaguucaucggcuacggcaaggccacccucgagugccagguccagaccgccgucgacuucggcaacuccuacaucgccgagauggagaccgaguccuggaucgucgaccgccagugggcccaggaccucacccuccccuggcaguccggcuccggcggcgucuggcgcgagaugcaccaccucgucgaguucgagcccccccacgccgccaccauccgcguccucgcccucggcaaccaggagggcucccucaagaccgcccucaccggcgccaugcgcgucaccaaggacaccaacgacaacaaccucuacaagcuccacggcggccacgucuccugccgcgucaagcucuccgcccucacccucaagggcaccuccuacaagaucugcaccgacaagauguucuucgucaagaaccccaccgacaccggccacggcaccgucgucaugcaggucaaggucuccaagggcgcccccugccgcauccccgucaucgucgccgacgaccucaccgccgccaucaacaagggcauccucgucaccgucaaccccaucgccuccaccaacgacgacgagguccucaucgaggucaacccccccuucggcgacuccuacaucaucgucggccgcggcgacucccgccucaccuaccaguggcacaaggagggcuccuccaucggcaagcucuucacccagaccaugaagggcgucgagcgccucgccgucaugggcgacaccgccugggacuucuccuccgccggcggcuucuucaccuccgucggcaagggcauccacaccgucuucggcuccgccuuccagggccucuucggcggccucaacuggaucaccaaggucaucaugggcgccguccucaucugggucggcaucaacacccgcaacaugaccauguccauguccaugauccucgucggcgucaucaugauguuccucucccucggcgucggcgccgaccagggcugcgccaucaacuucggcaagugaggacuagucccuguucccagagcccacuuuuuuuucuuuuuuugaaauaaaauagccugucuuucagaucuaaaaaaaaaaaaaaaaaaaaaaaaaaaaaaaaaaaaaaaaaaaaaaaaaaaaaaaaaaaaaaaaugcaucccccccccccccccccccccccccccccccaaaggcucuuuucagagccaccagaauu

SEQ ID NO: 1277 - RNA, 2368 nt, Artificial Sequence
  mRNA product Design a-4 comprising derived and/or modified sequence from YFV__NC_002031.1__SSjev-prME (polyprotein: aa122-778) (opt2)
gggagacuccugucgggcggaaguaggaggaguagaguuuaaaaacaguacucuuuuuccgguucgggacguaguugaagcaacgacaagccggauaaccgcucuugagacaggaagcuuaccaugggcaagcgcuccgccggcuccaucauguggcucgccucccucgccgucgucaucgccugcgccggcgccgucacccucguccgcaagaaccgcuggcuccuccucaacgucaccuccgaggaccucggcaagaccuucuccgucggcaccggcaacugcaccaccaacauccucgaggccaaguacuggugccccgacuccauggaguacaacugccccaaccucuccccccgcgaggagcccgacgacaucgacugcuggugcuacggcgucgagaacguccgcgucgccuacggcaagugcgacuccgccggccgcucccgccgcucccgccgcgccaucgaccuccccacccacgagaaccacggccucaagacccgccaggagaaguggaugaccggccgcaugggcgagcgccagcuccagaagaucgagcgcugguucguccgcaaccccuucuucgccgucaccgcccucaccaucgccuaccucgucggcuccaacaugacccagcgcgucgucaucgcccuccucguccucgccgucggccccgccuacuccgcccacugcaucggcaucaccgaccgcgacuucaucgagggcguccacggcggcaccugggucuccgccacccucgagcaggacaagugcgucaccgucauggcccccgacaagcccucccucgacaucucccucgagaccgucgccaucgaccgccccgccgagguccgcaaggucugcuacaacgccguccucacccacgucaagaucaacgacaagugccccuccaccggcgaggcccaccucgccgaggagaacgagggcgacaacgccugcaagcgcaccuacuccgaccgcggcuggggcaacggcugcggccucuucggcaagggcuccaucgucgccugcgccaaguucaccugcgccaaguccaugucccucuucgaggucgaccagaccaagauccaguacgucauccgcgcccagcuccacgucggcgccaagcaggagaacuggaacaccgacaucaagacccucaaguucgacgcccucuccggcucccaggaggucgaguucaucggcuacggcaaggccacccucgagugccagguccagaccgccgucgacuucggcaacuccuacaucgccgagauggagaccgaguccuggaucgucgaccgccagugggcccaggaccucacccuccccuggcaguccggcuccggcggcgucuggcgcgagaugcaccaccucgucgaguucgagcccccccacgccgccaccauccgcguccucgcccucggcaaccaggagggcucccucaagaccgcccucaccggcgccaugcgcgucaccaaggacaccaacgacaacaaccucuacaagcuccacggcggccacgucuccugccgcgucaagcucuccgcccucacccucaagggcaccuccuacaagaucugcaccgacaagauguucuucgucaagaaccccaccgacaccggccacggcaccgucgucaugcaggucaaggucuccaagggcgcccccugccgcauccccgucaucgucgccgacgaccucaccgccgccaucaacaagggcauccucgucaccgucaaccccaucgccuccaccaacgacgacgagguccucaucgaggucaacccccccuucggcgacuccuacaucaucgucggccgcggcgacucccgccucaccuaccaguggcacaaggagggcuccuccaucggcaagcucuucacccagaccaugaagggcgucgagcgccucgccgucaugggcgacaccgccugggacuucuccuccgccggcggcuucuucaccuccgucggcaagggcauccacaccgucuucggcuccgccuuccagggccucuucggcggccucaacuggaucaccaaggucaucaugggcgccguccucaucugggucggcaucaacacccgcaacaugaccauguccauguccaugauccucgucggcgucaucaugauguuccucucccucggcgucggcgccugaggacuagucccuguucccagagcccacuuuuuuuucuuuuuuugaaauaaaauagccugucuuucagaucuaaaaaaaaaaaaaaaaaaaaaaaaaaaaaaaaaaaaaaaaaaaaaaaaaaaaaaaaaaaaaaaaugcaucccccccccccccccccccccccccccccccaaaggcucuuuucagagccaccagaauu

SEQ ID NO: 1278 - RNA, 2416 nt, Artificial Sequence
  mRNA product Design a-4 comprising derived and/or modified sequence from YFV__NC_002031.1__X-SS-prME-XX (polyprotein: aa92-788) (opt3)
gggagacuccugucgggcggaaguaggaggaguagaguuuaaaaacaguacucuuuuuccgguucgggacguaguugaagcaacgacaagccggauaaccgcucuugagacaggaagcuuaccaugagaggccugagcuccaggaagcggcgcucucacgacgugcucaccguccaguuccuuauccuggggauguuguuaaugacaggagguguuacucuggugcguaaaaaccgauggcuacuccugaauguaacgucagaggaucuuggcaagaccuuuaguguggggacaggaaacugcacuaccaauauucuggaagccaaauacuggugucccgacagcauggaguauaacugcccuaauuuguccccaagagaggaaccggaugacauagauuguuggugcuacggcgucgaaaacgugaggguugcuuaugguaagugugacucugcagggcggucgcgcagaucaaggcgggccaucgaucuccccacacaugagaaucacggacugaaaacccgccaagagaaguggaugacuggccgaaugggcgaaagacagcugcagaagauugagaggugguucgugcggaacccuuucuucgcggucacagcucucaccaucgccuacuuaguggggagcaauaugacgcagcguguaguuauugcacugcuuguguuggccgucggaccagcuuauagugcacauugcaucgguauaacugaccgcgauuuuaucgaaggcgugcacgggggaaccuggguguccgccacacuggagcaagacaaaugugucacuguuauggcucccgauaagccuucucuagacauuagccucgagaccguggccaucgauagaccagcggaaguaaggaaagugugcuacaacgcaguccugacacaugugaagauuaaugacaaaugucccuccaccggcgaggcccaccuugcugaagagaacgaaggugacaaugccugcaagcggacguauucagaucgaggguggggaaacggcuguggccuguucgggaagggaaguaucguugcaugcgcuaaauuuacuugcgccaagagcaugucuuuguucgagguggaccagacaaaaauacaguacgucauucgcgcgcagcuccacgugggugccaagcaagagaauuggaacaccgauaucaaaacucugaaguuugacgcauuauccggcucacaggaaguagaguucauuggguacggaaaagcuacacuggaaugucagguucagaccgccguggauuuuggcaacagcuauaucgcugagauggaaacggagaguuggaucgucgacagacaaugggcccaggaucucacccuuccuuggcagucugguuccgggggcguguggagggagaugcaucaccuggucgaauuugagccaccgcaugcagccacaauucggguguuggcucuaggaaaucaagaaggcagccugaagacugcgcucaccggggcaaugcgcguuacaaaggacacuaacgauaauaaccuguacaaacuucacggaggucacgugucgugcagaguaaagcugucugccuugacccucaaaggcacauccuauaagauauguaccgacaaaauguuuuucgucaagaaucccacugauacggggcauggaacagugguuaugcaagugaaggucucaaaaggcgcuccuugcaggaucccagugauuguagccgacgaccugaccgcagccaucaacaaggguauauuagugacuguuaaucccauugcuaguaccaacgaugacgagguccugaucgaagugaauccuccauucggggauagcuacaucauugugggccguggagacucccggcuaacauaucaguggcacaaagagggcucuagcaucgggaagcucuuuacccagacuaugaaaggagucgagcgacuggccguuaugggugauacagcaugggacuucucaagugcgggcggguuuuucacguccgugggaaagggcauucauaccguguuugguagcgcuuuccaggggcuuuuuggcggauugaacuggauaacuaagguaaucaugggcgccguccugauuuggguggggaucaauacaagaaacaugaccaugucuaugucaaugauccucguuggagugauuaugauguuccugagucuuggcgucggugcagaucaggggugugccauaaauuuuggaaaaugaggacuagucccuguucccagagcccacuuuuuuuucuuuuuuugaaauaaaauagccugucuuucagaucuaaaaaaaaaaaaaaaaaaaaaaaaaaaaaaaaaaaaaaaaaaaaaaaaaaaaaaaaaaaaaaaaugcaucccccccccccccccccccccccccccccccaaaggcucuuuucagagccaccagaauu

SEQ ID NO: 1279 - RNA, 2353 nt, Artificial Sequence
  mRNA product Design a-4 comprising derived and/or modified sequence from YFV__NC_002031.1__SS-prME (polyprotein: M,aa104-778) (opt3)
gggagacuccugucgggcggaaguaggaggaguagaguuuaaaaacaguacucuuuuuccgguucgggacguaguugaagcaacgacaagccggauaaccgcucuugagacaggaagcuuaccauggacgugcugaccguccaguuccucauccuuggcaugcuguugaugacagggggaguuacuuuagugagaaagaacagguggcugcuacucaauguaacgagcgaggaucuggguaaaaccuuuuccgugggcacagggaacugcacuaccaauauucuugaagccaaguacuggugucccgacucuauggaguauaacugcccuaaucugucaccacgggaggaaccggaugacauagauuguuggugcuacggagucgaaaacgugcgcguugcuuauggcaaaugugacagugcaggucgaagccguagauccaggcgggccaucgauuugcccacacacgagaaucaugggcucaagacccgccaagagaaauggaugacuggaagaaugggcgaaaggcagcugcagaagauugagcggugguucgugcgcaacccuuucuucgcggucacagcucugaccaucgccuaccucgugggcucuaauaugacgcagcgaguaguuauugcauuacuggugcuugccgucgggccagcuuauucggcacacugcaucggaauaacugacagagauuuuaucgaaggugugcauggcgggaccugggugucagccacauuggagcaagacaagugugucacuguuauggcucccgauaaaccuagccuggacauuagucuagagaccguggccaucgauaggccagcggaaguacggaaggugugcuacaacgcaguccucacacacgugaaaauuaaugacaagugucccuccaccggagaggcccaucuggcugaagagaacgaaggcgacaaugccugcaaacguacguauucugaucgcgguugggggaacggauguggccuuuucggcaaggggagcaucguugcaugcgcuaaguuuacuugcgccaaauccaugucacuguucgagguggaccagacaaagauacaguacgucauuagagcgcaguugcacgugggagccaaacaagagaauuggaacaccgauaucaagacucucaaauuugacgcacugagugguagccaggaaguagaguucauuggcuacgggaaggcuacauuagaaugucagguucagaccgccguggauuuuggaaacucuuauaucgcugagauggaaacggaguccuggaucgucgacaggcaaugggcccaggaucugacccucccuuggcagucaggcagcggugggguguggcgggagaugcaccaucuugucgaauuugagccaccgcacgcagccacaauucgagugcuggcuuugggcaaucaagaaggaagucuaaaaacugcgcugaccggcgcaaugcgcguuacaaaggacacuaacgauaauaaccucuacaagcugcaugggggacacgugucuugcagaguaaaacuuuccgcccugaccuugaaggguacaagcuauaaaauauguaccgacaagauguuuuucgucaaaaaucccacugauacgggccacgggacagugguuaugcaagugaaggucucgaagggagcuccuugcaggaucccagugauuguagccgacgaccucaccgcagccaucaacaaaggcauacuggugacuguuaaucccauugcuucuaccaacgaugacgaggucuuaaucgaagugaauccuccauucggugauuccuacaucauuguggggcggggcgacucacgccugacauaucaguggcauaaggagggaaguagcaucggcaaacuauuuacccagacuaugaagggggucgagagacucgccguuaugggagauacagcaugggacuucuccucugcggguggcuuuuucacgagcguggggaaaggcauucacaccguguuuggaucagcuuuccagggucuguuugggggccuuaacuggauaacuaagguaaucaugggagccgucuugauuugggugggcaucaauacaaggaacaugaccaugaguauguccaugauccugguuggggugauuaugauguuccucagccugggagucggcgcaugaggacuagucccuguucccagagcccacuuuuuuuucuuuuuuugaaauaaaauagccugucuuucagaucuaaaaaaaaaaaaaaaaaaaaaaaaaaaaaaaaaaaaaaaaaaaaaaaaaaaaaaaaaaaaaaaaugcaucccccccccccccccccccccccccccccccaaaggcucuuuucagagccaccagaauu

SEQ ID NO: 1280 - RNA, 2380 nt, Artificial Sequence
  mRNA product Design a-4 comprising derived and/or modified sequence from YFV__NC_002031.1__SSIgE-prME-XX (polyprotein: aa122-788) (opt3)
gggagacuccugucgggcggaaguaggaggaguagaguuuaaaaacaguacucuuuuuccgguucgggacguaguugaagcaacgacaagccggauaaccgcucuugagacaggaagcuuaccauggacuggaccuggauccuguuccucguggccgcugcaacaagaguccacagcguuacucuggugcguaaaaaccgauggcuacuccugaauguaacgucagaggaucuuggcaagaccuuuaguguggggacaggaaacugcacuaccaauauucuggaagccaaauacuggugucccgacagcauggaguauaacugcccuaauuuguccccaagagaggaaccggaugacauagauuguuggugcuacggcgucgaaaacgugaggguugcuuaugguaagugugacucugcagggcggucgcgcagaucaaggcgggccaucgaucuccccacacaugagaaucacggacugaaaacccgccaagagaaguggaugacuggccgaaugggcgaaagacagcugcagaagauugagaggugguucgugcggaacccuuucuucgcggucacagcucucaccaucgccuacuuaguggggagcaauaugacgcagcguguaguuauugcacugcuuguguuggccgucggaccagcuuauagugcacauugcaucgguauaacugaccgcgauuuuaucgaaggcgugcacgggggaaccuggguguccgccacacuggagcaagacaaaugugucacuguuauggcucccgauaagccuucucuagacauuagccucgagaccguggccaucgauagaccagcggaaguaaggaaagugugcuacaacgcaguccugacacaugugaagauuaaugacaaaugucccuccaccggcgaggcccaccuugcugaagagaacgaaggugacaaugccugcaagcggacguauucagaucgaggguggggaaacggcuguggccuguucgggaagggaaguaucguugcaugcgcuaaauuuacuugcgccaagagcaugucuuuguucgagguggaccagacaaaaauacaguacgucauucgcgcgcagcuccacgugggugccaagcaagagaauuggaacaccgauaucaaaacucugaaguuugacgcauuauccggcucacaggaaguagaguucauuggguacggaaaagcuacacuggaaugucagguucagaccgccguggauuuuggcaacagcuauaucgcugagauggaaacggagaguuggaucgucgacagacaaugggcccaggaucucacccuuccuuggcagucugguuccgggggcguguggagggagaugcaucaccuggucgaauuugagccaccgcaugcagccacaauucggguguuggcucuaggaaaucaagaaggcagccugaagacugcgcucaccggggcaaugcgcguuacaaaggacacuaacgauaauaaccuguacaaacuucacggaggucacgugucgugcagaguaaagcugucugccuugacccucaaaggcacauccuauaagauauguaccgacaaaauguuuuucgucaagaaucccacugauacggggcauggaacagugguuaugcaagugaaggucucaaaaggcgcuccuugcaggaucccagugauuguagccgacgaccugaccgcagccaucaacaaggguauauuagugacuguuaaucccauugcuaguaccaacgaugacgagguccugaucgaagugaauccuccauucggggauagcuacaucauugugggccguggagacucccggcuaacauaucaguggcacaaagagggcucuagcaucgggaagcucuuuacccagacuaugaaaggagucgagcgacuggccguuaugggugauacagcaugggacuucucaagugcgggcggguuuuucacguccgugggaaagggcauucauaccguguuugguagcgcuuuccaggggcuuuuuggcggauugaacuggauaacuaagguaaucaugggcgccguccugauuuggguggggaucaauacaagaaacaugaccaugucuaugucaaugauccucguuggagugauuaugauguuccugagucuuggcgucggugcagaucaggggugugccauaaauuuuggaaaaugaggacuagucccuguucccagagcccacuuuuuuuucuuuuuuugaaauaaaauagccugucuuucagaucuaaaaaaaaaaaaaaaaaaaaaaaaaaaaaaaaaaaaaaaaaaaaaaaaaaaaaaaaaaaaaaaaugcaucccccccccccccccccccccccccccccccaaaggcucuuuucagagccaccagaauu

SEQ ID NO: 1281 - RNA, 2350 nt, Artificial Sequence
  mRNA product Design a-4 comprising derived and/or modified sequence from YFV__NC_002031.1__SSIgE-prME (polyprotein: aa122-778) (opt3)
gggagacuccugucgggcggaaguaggaggaguagaguuuaaaaacaguacucuuuuuccgguucgggacguaguugaagcaacgacaagccggauaaccgcucuugagacaggaagcuuaccauggacuggaccuggauccuguuccucguggccgcugcaacaagaguccacagcgugacccuggucagaaagaacagguggcuccuucugaauguuacaagcgaggacuugggcaaaacuuucuccguggggacgggaaacugcaccacaaauaucuuagaagccaaguacuggugucccgauucuauggaguauaacugcccuaaucugucaccacgggaggaaccggacgauauugacuguuggugcuacgguguagaaaacgugcgcgucgcuuauggcaaaugugauagugcagggcgaagccguagauccaggcgggccauagaccuacccacucacgagaaucauggacucaagacccgccaggagaaauggaugacaggcagaaugggugaaaggcaacugcagaagaucgagcggugguuugugcgcaacccuuucuuugcgguuaccgcucuuacuauugccuaccugguggggucuaauaugacacagcgagucgugaucgcauugcucguacuggccguuggaccagcuuauucggcacacugcauuggcaucaccgauagagacuucauagaaggcgugcaugggggaacgugggucucagccacucuggagcaggauaagugugugaccgugauggcucccgacaaaccuagccucgauaucaguuuagagacagucgccauugacaggccagcggaaguucggaaggugugcuacaacgcaguacugacucacgugaaaaucaaugauaagugucccuccaccggugaggcccaucuugcugaagagaacgaaggcgacaaugccugcaaacguacauauucugaccgcggguggggaaacggcugugguuuguuugggaagggaagcauugucgcaugcgcuaaguuuaccugcgccaaauccaugucacuguucgagguggaucaaacgaagauccaguacguuauaagagcgcagcuacacgugggcgccaaacaggagaauuggaacacugacauuaagacacucaaauucgaugcacugaguggcagccaagaagucgaguuuaucggguacggaaaggcuacccuugaaugucaggugcagacugccguagacuucgguaacucuuauauugcugagauggaaacagaguccuggaucguugauaggcagugggcccaagaccugaccuugccuuggcagucaggcagcgggggaguguggcgggagaugcaccaucucgucgaauuugagccaccgcacgcagccacgauccgagugcuggcuuuaggcaaucaggaagguagucugaaaaccgcgcucacaggggcaaugcgcgucacuaaggauaccaacgacaauaaccuuuacaagcugcauggcggacacgugucuugcagaguuaaauuguccgcccuaacacugaagggcacuagcuauaaaauuuguaccgauaagauguucuuugugaaaaaucccacagacaccgggcacggaacuguagucaugcaagugaagguuucgaagggugcuccuugcaggauaccagugaucgucgccgaugaccucacggcagccauuaacaaaggcauccuggugacaguaaaucccauagcuucuaccaacgacgaugaggugcuuauugaaguuaauccuccauucggggacuccuacaucaucgucggacggggcgauucacgccugacuuaucaguggcauaaggaggguaguagcauugggaaauuguucacccagacaaugaagggcguggagagacucgccgugaugggagacaccgcaugggauuuuuccucugcgggcggguucuuuacuagcgucggaaaagguauccacacaguuuucggcucagcuuuucaggggcuguucggaggcuuaaacuggauuacgaaggugauaaugggugccgugcugaucuggguagggauuaauaccaggaacaugacuaugaguauguccaugauccuagucggcgugaucaugauguuucucagccugggaguuggcgcaugaggacuagucccuguucccagagcccacuuuuuuuucuuuuuuugaaauaaaauagccugucuuucagaucuaaaaaaaaaaaaaaaaaaaaaaaaaaaaaaaaaaaaaaaaaaaaaaaaaaaaaaaaaaaaaaaaugcaucccccccccccccccccccccccccccccccaaaggcucuuuucagagccaccagaauu

SEQ ID NO: 1282 - RNA, 2398 nt, Artificial Sequence
  mRNA product Design a-4 comprising derived and/or modified sequence from YFV__NC_002031.1__SSjev-prME-XX (polyprotein: aa122-788) (opt3)
gggagacuccugucgggcggaaguaggaggaguagaguuuaaaaacaguacucuuuuuccgguucgggacguaguugaagcaacgacaagccggauaaccgcucuugagacaggaagcuuaccaugggcaagagaagcgccggguccaucauguggcuggcuucucucgcaguggucauugccugcgcgggagcuguuacucuggugcguaaaaaccgauggcuacuccugaauguaacgucagaggaucuuggcaagaccuuuaguguggggacaggaaacugcacuaccaauauucuggaagccaaauacuggugucccgacagcauggaguauaacugcccuaauuuguccccaagagaggaaccggaugacauagauuguuggugcuacggcgucgaaaacgugaggguugcuuaugguaagugugacucugcagggcggucgcgcagaucaaggcgggccaucgaucuccccacacaugagaaucacggacugaaaacccgccaagagaaguggaugacuggccgaaugggcgaaagacagcugcagaagauugagaggugguucgugcggaacccuuucuucgcggucacagcucucaccaucgccuacuuaguggggagcaauaugacgcagcguguaguuauugcacugcuuguguuggccgucggaccagcuuauagugcacauugcaucgguauaacugaccgcgauuuuaucgaaggcgugcacgggggaaccuggguguccgccacacuggagcaagacaaaugugucacuguuauggcucccgauaagccuucucuagacauuagccucgagaccguggccaucgauagaccagcggaaguaaggaaagugugcuacaacgcaguccugacacaugugaagauuaaugacaaaugucccuccaccggcgaggcccaccuugcugaagagaacgaaggugacaaugccugcaagcggacguauucagaucgaggguggggaaacggcuguggccuguucgggaagggaaguaucguugcaugcgcuaaauuuacuugcgccaagagcaugucuuuguucgagguggaccagacaaaaauacaguacgucauucgcgcgcagcuccacgugggugccaagcaagagaauuggaacaccgauaucaaaacucugaaguuugacgcauuauccggcucacaggaaguagaguucauuggguacggaaaagcuacacuggaaugucagguucagaccgccguggauuuuggcaacagcuauaucgcugagauggaaacggagaguuggaucgucgacagacaaugggcccaggaucucacccuuccuuggcagucugguuccgggggcguguggagggagaugcaucaccuggucgaauuugagccaccgcaugcagccacaauucggguguuggcucuaggaaaucaagaaggcagccugaagacugcgcucaccggggcaaugcgcguuacaaaggacacuaacgauaauaaccuguacaaacuucacggaggucacgugucgugcagaguaaagcugucugccuugacccucaaaggcacauccuauaagauauguaccgacaaaauguuuuucgucaagaaucccacugauacggggcauggaacagugguuaugcaagugaaggucucaaaaggcgcuccuugcaggaucccagugauuguagccgacgaccugaccgcagccaucaacaaggguauauuagugacuguuaaucccauugcuaguaccaacgaugacgagguccugaucgaagugaauccuccauucggggauagcuacaucauugugggccguggagacucccggcuaacauaucaguggcacaaagagggcucuagcaucgggaagcucuuuacccagacuaugaaaggagucgagcgacuggccguuaugggugauacagcaugggacuucucaagugcgggcggguuuuucacguccgugggaaagggcauucauaccguguuugguagcgcuuuccaggggcuuuuuggcggauugaacuggauaacuaagguaaucaugggcgccguccugauuuggguggggaucaauacaagaaacaugaccaugucuaugucaaugauccucguuggagugauuaugauguuccugagucuuggcgucggugcagaucaggggugugccauaaauuuuggaaaaugaggacuagucccuguucccagagcccacuuuuuuuucuuuuuuugaaauaaaauagccugucuuucagaucuaaaaaaaaaaaaaaaaaaaaaaaaaaaaaaaaaaaaaaaaaaaaaaaaaaaaaaaaaaaaaaaaugcaucccccccccccccccccccccccccccccccaaaggcucuuuucagagccaccagaauu

SEQ ID NO: 1283 - RNA, 2368 nt, Artificial Sequence
  mRNA product Design a-4 comprising derived and/or modified sequence from YFV__NC_002031.1__SSjev-prME (polyprotein: aa122-778) (opt3)
gggagacuccugucgggcggaaguaggaggaguagaguuuaaaaacaguacucuuuuuccgguucgggacguaguugaagcaacgacaagccggauaaccgcucuugagacaggaagcuuaccaugggcaagagaagcgccggguccaucauguggcuggcuucucucgcaguggucauugccugcgcgggagcugugacccuggucagaaagaacagguggcuccuucugaauguuacaagcgaggacuugggcaaaacuuucuccguggggacgggaaacugcaccacaaauaucuuagaagccaaguacuggugucccgauucuauggaguauaacugcccuaaucugucaccacgggaggaaccggacgauauugacuguuggugcuacgguguagaaaacgugcgcgucgcuuauggcaaaugugauagugcagggcgaagccguagauccaggcgggccauagaccuacccacucacgagaaucauggacucaagacccgccaggagaaauggaugacaggcagaaugggugaaaggcaacugcagaagaucgagcggugguuugugcgcaacccuuucuuugcgguuaccgcucuuacuauugccuaccugguggggucuaauaugacacagcgagucgugaucgcauugcucguacuggccguuggaccagcuuauucggcacacugcauuggcaucaccgauagagacuucauagaaggcgugcaugggggaacgugggucucagccacucuggagcaggauaagugugugaccgugauggcucccgacaaaccuagccucgauaucaguuuagagacagucgccauugacaggccagcggaaguucggaaggugugcuacaacgcaguacugacucacgugaaaaucaaugauaagugucccuccaccggugaggcccaucuugcugaagagaacgaaggcgacaaugccugcaaacguacauauucugaccgcggguggggaaacggcugugguuuguuugggaagggaagcauugucgcaugcgcuaaguuuaccugcgccaaauccaugucacuguucgagguggaucaaacgaagauccaguacguuauaagagcgcagcuacacgugggcgccaaacaggagaauuggaacacugacauuaagacacucaaauucgaugcacugaguggcagccaagaagucgaguuuaucggguacggaaaggcuacccuugaaugucaggugcagacugccguagacuucgguaacucuuauauugcugagauggaaacagaguccuggaucguugauaggcagugggcccaagaccugaccuugccuuggcagucaggcagcgggggaguguggcgggagaugcaccaucucgucgaauuugagccaccgcacgcagccacgauccgagugcuggcuuuaggcaaucaggaagguagucugaaaaccgcgcucacaggggcaaugcgcgucacuaaggauaccaacgacaauaaccuuuacaagcugcauggcggacacgugucuugcagaguuaaauuguccgcccuaacacugaagggcacuagcuauaaaauuuguaccgauaagauguucuuugugaaaaaucccacagacaccgggcacggaacuguagucaugcaagugaagguuucgaagggugcuccuugcaggauaccagugaucgucgccgaugaccucacggcagccauuaacaaaggcauccuggugacaguaaaucccauagcuucuaccaacgacgaugaggugcuuauugaaguuaauccuccauucggggacuccuacaucaucgucggacggggcgauucacgccugacuuaucaguggcauaaggaggguaguagcauugggaaauuguucacccagacaaugaagggcguggagagacucgccgugaugggagacaccgcaugggauuuuuccucugcgggcggguucuuuacuagcgucggaaaagguauccacacaguuuucggcucagcuuuucaggggcuguucggaggcuuaaacuggauuacgaaggugauaaugggugccgugcugaucuggguagggauuaauaccaggaacaugacuaugaguauguccaugauccuagucggcgugaucaugauguuucucagccugggaguuggcgcaugaggacuagucccuguucccagagcccacuuuuuuuucuuuuuuugaaauaaaauagccugucuuucagaucuaaaaaaaaaaaaaaaaaaaaaaaaaaaaaaaaaaaaaaaaaaaaaaaaaaaaaaaaaaaaaaaaugcaucccccccccccccccccccccccccccccccaaaggcucuuuucagagccaccagaauu

SEQ ID NO: 1284 - RNA, 2416 nt, Artificial Sequence
  mRNA product Design a-4 comprising derived and/or modified sequence from YFV__NC_002031.1__X-SS-prME-XX (polyprotein: aa92-788) (opt4)
gggagacuccugucgggcggaaguaggaggaguagaguuuaaaaacaguacucuuuuuccgguucgggacguaguugaagcaacgacaagccggauaaccgcucuugagacaggaagcuuaccaugagaggccugagcagcagaaagagaagaagccacgacgugcugaccgugcaguuccugauccugggcaugcugcugaugaccggcggcgugacccuggugagaaagaacagauggcugcugcugaacgugaccagcgaggaccugggcaagaccuucagcgugggcaccggcaacugcaccaccaacauccuggaggccaaguacuggugccccgacagcauggaguacaacugccccaaccugagccccagagaggagcccgacgacaucgacugcuggugcuacggcguggagaacgugagaguggccuacggcaagugcgacagcgccggcagaagcagaagaagcagaagagccaucgaccugcccacccacgagaaccacggccugaagaccagacaggagaaguggaugaccggcagaaugggcgagagacagcugcagaagaucgagagaugguucgugagaaaccccuucuucgccgugaccgcccugaccaucgccuaccuggugggcagcaacaugacccagagaguggugaucgcccugcuggugcuggccgugggccccgccuacagcgcccacugcaucggcaucaccgacagagacuucaucgagggcgugcacggcggcaccugggugagcgccacccuggagcaggacaagugcgugaccgugauggcccccgacaagcccagccuggacaucagccuggagaccguggccaucgacagacccgccgaggugagaaaggugugcuacaacgccgugcugacccacgugaagaucaacgacaagugccccagcaccggcgaggcccaccuggccgaggagaacgagggcgacaacgccugcaagagaaccuacagcgacagaggcuggggcaacggcugcggccuguucggcaagggcagcaucguggccugcgccaaguucaccugcgccaagagcaugagccuguucgagguggaccagaccaagauccaguacgugaucagagcccagcugcacgugggcgccaagcaggagaacuggaacaccgacaucaagacccugaaguucgacgcccugagcggcagccaggagguggaguucaucggcuacggcaaggccacccuggagugccaggugcagaccgccguggacuucggcaacagcuacaucgccgagauggagaccgagagcuggaucguggacagacagugggcccaggaccugacccugcccuggcagagcggcagcggcggcguguggagagagaugcaccaccugguggaguucgagcccccccacgccgccaccaucagagugcuggcccugggcaaccaggagggcagccugaagaccgcccugaccggcgccaugagagugaccaaggacaccaacgacaacaaccuguacaagcugcacggcggccacgugagcugcagagugaagcugagcgcccugacccugaagggcaccagcuacaagaucugcaccgacaagauguucuucgugaagaaccccaccgacaccggccacggcaccguggugaugcaggugaaggugagcaagggcgcccccugcagaauccccgugaucguggccgacgaccugaccgccgccaucaacaagggcauccuggugaccgugaaccccaucgccagcaccaacgacgacgaggugcugaucgaggugaacccccccuucggcgacagcuacaucaucgugggcagaggcgacagcagacugaccuaccaguggcacaaggagggcagcagcaucggcaagcuguucacccagaccaugaagggcguggagagacuggccgugaugggcgacaccgccugggacuucagcagcgccggcggcuucuucaccagcgugggcaagggcauccacaccguguucggcagcgccuuccagggccuguucggcggccugaacuggaucaccaaggugaucaugggcgccgugcugaucugggugggcaucaacaccagaaacaugaccaugagcaugagcaugauccuggugggcgugaucaugauguuccugagccugggcgugggcgccgaccagggcugcgccaucaacuucggcaagugaggacuagucccuguucccagagcccacuuuuuuuucuuuuuuugaaauaaaauagccugucuuucagaucuaaaaaaaaaaaaaaaaaaaaaaaaaaaaaaaaaaaaaaaaaaaaaaaaaaaaaaaaaaaaaaaaugcaucccccccccccccccccccccccccccccccaaaggcucuuuucagagccaccagaauu

SEQ ID NO: 1285 - RNA, 2353 nt, Artificial Sequence
  mRNA product Design a-4 comprising derived and/or modified sequence from YFV__NC_002031.1__SS-prME (polyprotein: M,aa104-778) (opt4)
gggagacuccugucgggcggaaguaggaggaguagaguuuaaaaacaguacucuuuuuccgguucgggacguaguugaagcaacgacaagccggauaaccgcucuugagacaggaagcuuaccauggacgugcugaccgugcaguuccugauccugggcaugcugcugaugaccggcggcgugacccuggugagaaagaacagauggcugcugcugaacgugaccagcgaggaccugggcaagaccuucagcgugggcaccggcaacugcaccaccaacauccuggaggccaaguacuggugccccgacagcauggaguacaacugccccaaccugagccccagagaggagcccgacgacaucgacugcuggugcuacggcguggagaacgugagaguggccuacggcaagugcgacagcgccggcagaagcagaagaagcagaagagccaucgaccugcccacccacgagaaccacggccugaagaccagacaggagaaguggaugaccggcagaaugggcgagagacagcugcagaagaucgagagaugguucgugagaaaccccuucuucgccgugaccgcccugaccaucgccuaccuggugggcagcaacaugacccagagaguggugaucgcccugcuggugcuggccgugggccccgccuacagcgcccacugcaucggcaucaccgacagagacuucaucgagggcgugcacggcggcaccugggugagcgccacccuggagcaggacaagugcgugaccgugauggcccccgacaagcccagccuggacaucagccuggagaccguggccaucgacagacccgccgaggugagaaaggugugcuacaacgccgugcugacccacgugaagaucaacgacaagugccccagcaccggcgaggcccaccuggccgaggagaacgagggcgacaacgccugcaagagaaccuacagcgacagaggcuggggcaacggcugcggccuguucggcaagggcagcaucguggccugcgccaaguucaccugcgccaagagcaugagccuguucgagguggaccagaccaagauccaguacgugaucagagcccagcugcacgugggcgccaagcaggagaacuggaacaccgacaucaagacccugaaguucgacgcccugagcggcagccaggagguggaguucaucggcuacggcaaggccacccuggagugccaggugcagaccgccguggacuucggcaacagcuacaucgccgagauggagaccgagagcuggaucguggacagacagugggcccaggaccugacccugcccuggcagagcggcagcggcggcguguggagagagaugcaccaccugguggaguucgagcccccccacgccgccaccaucagagugcuggcccugggcaaccaggagggcagccugaagaccgcccugaccggcgccaugagagugaccaaggacaccaacgacaacaaccuguacaagcugcacggcggccacgugagcugcagagugaagcugagcgcccugacccugaagggcaccagcuacaagaucugcaccgacaagauguucuucgugaagaaccccaccgacaccggccacggcaccguggugaugcaggugaaggugagcaagggcgcccccugcagaauccccgugaucguggccgacgaccugaccgccgccaucaacaagggcauccuggugaccgugaaccccaucgccagcaccaacgacgacgaggugcugaucgaggugaacccccccuucggcgacagcuacaucaucgugggcagaggcgacagcagacugaccuaccaguggcacaaggagggcagcagcaucggcaagcuguucacccagaccaugaagggcguggagagacuggccgugaugggcgacaccgccugggacuucagcagcgccggcggcuucuucaccagcgugggcaagggcauccacaccguguucggcagcgccuuccagggccuguucggcggccugaacuggaucaccaaggugaucaugggcgccgugcugaucugggugggcaucaacaccagaaacaugaccaugagcaugagcaugauccuggugggcgugaucaugauguuccugagccugggcgugggcgccugaggacuagucccuguucccagagcccacuuuuuuuucuuuuuuugaaauaaaauagccugucuuucagaucuaaaaaaaaaaaaaaaaaaaaaaaaaaaaaaaaaaaaaaaaaaaaaaaaaaaaaaaaaaaaaaaaugcaucccccccccccccccccccccccccccccccaaaggcucuuuucagagccaccagaauu

SEQ ID NO: 1286 - RNA, 2380 nt, Artificial Sequence
  mRNA product Design a-4 comprising derived and/or modified sequence from YFV__NC_002031.1__SSIgE-prME-XX (polyprotein: aa122-788) (opt4)
gggagacuccugucgggcggaaguaggaggaguagaguuuaaaaacaguacucuuuuuccgguucgggacguaguugaagcaacgacaagccggauaaccgcucuugagacaggaagcuuaccauggacuggaccuggauccuguuccugguggccgccgccaccagagugcacagcgugacccuggugagaaagaacagauggcugcugcugaacgugaccagcgaggaccugggcaagaccuucagcgugggcaccggcaacugcaccaccaacauccuggaggccaaguacuggugccccgacagcauggaguacaacugccccaaccugagccccagagaggagcccgacgacaucgacugcuggugcuacggcguggagaacgugagaguggccuacggcaagugcgacagcgccggcagaagcagaagaagcagaagagccaucgaccugcccacccacgagaaccacggccugaagaccagacaggagaaguggaugaccggcagaaugggcgagagacagcugcagaagaucgagagaugguucgugagaaaccccuucuucgccgugaccgcccugaccaucgccuaccuggugggcagcaacaugacccagagaguggugaucgcccugcuggugcuggccgugggccccgccuacagcgcccacugcaucggcaucaccgacagagacuucaucgagggcgugcacggcggcaccugggugagcgccacccuggagcaggacaagugcgugaccgugauggcccccgacaagcccagccuggacaucagccuggagaccguggccaucgacagacccgccgaggugagaaaggugugcuacaacgccgugcugacccacgugaagaucaacgacaagugccccagcaccggcgaggcccaccuggccgaggagaacgagggcgacaacgccugcaagagaaccuacagcgacagaggcuggggcaacggcugcggccuguucggcaagggcagcaucguggccugcgccaaguucaccugcgccaagagcaugagccuguucgagguggaccagaccaagauccaguacgugaucagagcccagcugcacgugggcgccaagcaggagaacuggaacaccgacaucaagacccugaaguucgacgcccugagcggcagccaggagguggaguucaucggcuacggcaaggccacccuggagugccaggugcagaccgccguggacuucggcaacagcuacaucgccgagauggagaccgagagcuggaucguggacagacagugggcccaggaccugacccugcccuggcagagcggcagcggcggcguguggagagagaugcaccaccugguggaguucgagcccccccacgccgccaccaucagagugcuggcccugggcaaccaggagggcagccugaagaccgcccugaccggcgccaugagagugaccaaggacaccaacgacaacaaccuguacaagcugcacggcggccacgugagcugcagagugaagcugagcgcccugacccugaagggcaccagcuacaagaucugcaccgacaagauguucuucgugaagaaccccaccgacaccggccacggcaccguggugaugcaggugaaggugagcaagggcgcccccugcagaauccccgugaucguggccgacgaccugaccgccgccaucaacaagggcauccuggugaccgugaaccccaucgccagcaccaacgacgacgaggugcugaucgaggugaacccccccuucggcgacagcuacaucaucgugggcagaggcgacagcagacugaccuaccaguggcacaaggagggcagcagcaucggcaagcuguucacccagaccaugaagggcguggagagacuggccgugaugggcgacaccgccugggacuucagcagcgccggcggcuucuucaccagcgugggcaagggcauccacaccguguucggcagcgccuuccagggccuguucggcggccugaacuggaucaccaaggugaucaugggcgccgugcugaucugggugggcaucaacaccagaaacaugaccaugagcaugagcaugauccuggugggcgugaucaugauguuccugagccugggcgugggcgccgaccagggcugcgccaucaacuucggcaagugaggacuagucccuguucccagagcccacuuuuuuuucuuuuuuugaaauaaaauagccugucuuucagaucuaaaaaaaaaaaaaaaaaaaaaaaaaaaaaaaaaaaaaaaaaaaaaaaaaaaaaaaaaaaaaaaaugcaucccccccccccccccccccccccccccccccaaaggcucuuuucagagccaccagaauu

SEQ ID NO: 1287 - RNA, 2350 nt, Artificial Sequence
  mRNA product Design a-4 comprising derived and/or modified sequence from YFV__NC_002031.1__SSIgE-prME (polyprotein: aa122-778) (opt4)
gggagacuccugucgggcggaaguaggaggaguagaguuuaaaaacaguacucuuuuuccgguucgggacguaguugaagcaacgacaagccggauaaccgcucuugagacaggaagcuuaccauggacuggaccuggauccuguuccugguggccgccgccaccagagugcacagcgugacccuggugagaaagaacagauggcugcugcugaacgugaccagcgaggaccugggcaagaccuucagcgugggcaccggcaacugcaccaccaacauccuggaggccaaguacuggugccccgacagcauggaguacaacugccccaaccugagccccagagaggagcccgacgacaucgacugcuggugcuacggcguggagaacgugagaguggccuacggcaagugcgacagcgccggcagaagcagaagaagcagaagagccaucgaccugcccacccacgagaaccacggccugaagaccagacaggagaaguggaugaccggcagaaugggcgagagacagcugcagaagaucgagagaugguucgugagaaaccccuucuucgccgugaccgcccugaccaucgccuaccuggugggcagcaacaugacccagagaguggugaucgcccugcuggugcuggccgugggccccgccuacagcgcccacugcaucggcaucaccgacagagacuucaucgagggcgugcacggcggcaccugggugagcgccacccuggagcaggacaagugcgugaccgugauggcccccgacaagcccagccuggacaucagccuggagaccguggccaucgacagacccgccgaggugagaaaggugugcuacaacgccgugcugacccacgugaagaucaacgacaagugccccagcaccggcgaggcccaccuggccgaggagaacgagggcgacaacgccugcaagagaaccuacagcgacagaggcuggggcaacggcugcggccuguucggcaagggcagcaucguggccugcgccaaguucaccugcgccaagagcaugagccuguucgagguggaccagaccaagauccaguacgugaucagagcccagcugcacgugggcgccaagcaggagaacuggaacaccgacaucaagacccugaaguucgacgcccugagcggcagccaggagguggaguucaucggcuacggcaaggccacccuggagugccaggugcagaccgccguggacuucggcaacagcuacaucgccgagauggagaccgagagcuggaucguggacagacagugggcccaggaccugacccugcccuggcagagcggcagcggcggcguguggagagagaugcaccaccugguggaguucgagcccccccacgccgccaccaucagagugcuggcccugggcaaccaggagggcagccugaagaccgcccugaccggcgccaugagagugaccaaggacaccaacgacaacaaccuguacaagcugcacggcggccacgugagcugcagagugaagcugagcgcccugacccugaagggcaccagcuacaagaucugcaccgacaagauguucuucgugaagaaccccaccgacaccggccacggcaccguggugaugcaggugaaggugagcaagggcgcccccugcagaauccccgugaucguggccgacgaccugaccgccgccaucaacaagggcauccuggugaccgugaaccccaucgccagcaccaacgacgacgaggugcugaucgaggugaacccccccuucggcgacagcuacaucaucgugggcagaggcgacagcagacugaccuaccaguggcacaaggagggcagcagcaucggcaagcuguucacccagaccaugaagggcguggagagacuggccgugaugggcgacaccgccugggacuucagcagcgccggcggcuucuucaccagcgugggcaagggcauccacaccguguucggcagcgccuuccagggccuguucggcggccugaacuggaucaccaaggugaucaugggcgccgugcugaucugggugggcaucaacaccagaaacaugaccaugagcaugagcaugauccuggugggcgugaucaugauguuccugagccugggcgugggcgccugaggacuagucccuguucccagagcccacuuuuuuuucuuuuuuugaaauaaaauagccugucuuucagaucuaaaaaaaaaaaaaaaaaaaaaaaaaaaaaaaaaaaaaaaaaaaaaaaaaaaaaaaaaaaaaaaaugcaucccccccccccccccccccccccccccccccaaaggcucuuuucagagccaccagaauu

SEQ ID NO: 1288 - RNA, 2398 nt, Artificial Sequence
  mRNA product Design a-4 comprising derived and/or modified sequence from YFV__NC_002031.1__SSjev-prME-XX (polyprotein: aa122-788) (opt4)
gggagacuccugucgggcggaaguaggaggaguagaguuuaaaaacaguacucuuuuuccgguucgggacguaguugaagcaacgacaagccggauaaccgcucuugagacaggaagcuuaccaugggcaagagaagcgccggcagcaucauguggcuggccagccuggccguggugaucgccugcgccggcgccgugacccuggugagaaagaacagauggcugcugcugaacgugaccagcgaggaccugggcaagaccuucagcgugggcaccggcaacugcaccaccaacauccuggaggccaaguacuggugccccgacagcauggaguacaacugccccaaccugagccccagagaggagcccgacgacaucgacugcuggugcuacggcguggagaacgugagaguggccuacggcaagugcgacagcgccggcagaagcagaagaagcagaagagccaucgaccugcccacccacgagaaccacggccugaagaccagacaggagaaguggaugaccggcagaaugggcgagagacagcugcagaagaucgagagaugguucgugagaaaccccuucuucgccgugaccgcccugaccaucgccuaccuggugggcagcaacaugacccagagaguggugaucgcccugcuggugcuggccgugggccccgccuacagcgcccacugcaucggcaucaccgacagagacuucaucgagggcgugcacggcggcaccugggugagcgccacccuggagcaggacaagugcgugaccgugauggcccccgacaagcccagccuggacaucagccuggagaccguggccaucgacagacccgccgaggugagaaaggugugcuacaacgccgugcugacccacgugaagaucaacgacaagugccccagcaccggcgaggcccaccuggccgaggagaacgagggcgacaacgccugcaagagaaccuacagcgacagaggcuggggcaacggcugcggccuguucggcaagggcagcaucguggccugcgccaaguucaccugcgccaagagcaugagccuguucgagguggaccagaccaagauccaguacgugaucagagcccagcugcacgugggcgccaagcaggagaacuggaacaccgacaucaagacccugaaguucgacgcccugagcggcagccaggagguggaguucaucggcuacggcaaggccacccuggagugccaggugcagaccgccguggacuucggcaacagcuacaucgccgagauggagaccgagagcuggaucguggacagacagugggcccaggaccugacccugcccuggcagagcggcagcggcggcguguggagagagaugcaccaccugguggaguucgagcccccccacgccgccaccaucagagugcuggcccugggcaaccaggagggcagccugaagaccgcccugaccggcgccaugagagugaccaaggacaccaacgacaacaaccuguacaagcugcacggcggccacgugagcugcagagugaagcugagcgcccugacccugaagggcaccagcuacaagaucugcaccgacaagauguucuucgugaagaaccccaccgacaccggccacggcaccguggugaugcaggugaaggugagcaagggcgcccccugcagaauccccgugaucguggccgacgaccugaccgccgccaucaacaagggcauccuggugaccgugaaccccaucgccagcaccaacgacgacgaggugcugaucgaggugaacccccccuucggcgacagcuacaucaucgugggcagaggcgacagcagacugaccuaccaguggcacaaggagggcagcagcaucggcaagcuguucacccagaccaugaagggcguggagagacuggccgugaugggcgacaccgccugggacuucagcagcgccggcggcuucuucaccagcgugggcaagggcauccacaccguguucggcagcgccuuccagggccuguucggcggccugaacuggaucaccaaggugaucaugggcgccgugcugaucugggugggcaucaacaccagaaacaugaccaugagcaugagcaugauccuggugggcgugaucaugauguuccugagccugggcgugggcgccgaccagggcugcgccaucaacuucggcaagugaggacuagucccuguucccagagcccacuuuuuuuucuuuuuuugaaauaaaauagccugucuuucagaucuaaaaaaaaaaaaaaaaaaaaaaaaaaaaaaaaaaaaaaaaaaaaaaaaaaaaaaaaaaaaaaaaugcaucccccccccccccccccccccccccccccccaaaggcucuuuucagagccaccagaauu

SEQ ID NO: 1289 - RNA, 2368 nt, Artificial Sequence
  mRNA product Design a-4 comprising derived and/or modified sequence from YFV__NC_002031.1__SSjev-prME (polyprotein: aa122-778) (opt4)
gggagacuccugucgggcggaaguaggaggaguagaguuuaaaaacaguacucuuuuuccgguucgggacguaguugaagcaacgacaagccggauaaccgcucuugagacaggaagcuuaccaugggcaagagaagcgccggcagcaucauguggcuggccagccuggccguggugaucgccugcgccggcgccgugacccuggugagaaagaacagauggcugcugcugaacgugaccagcgaggaccugggcaagaccuucagcgugggcaccggcaacugcaccaccaacauccuggaggccaaguacuggugccccgacagcauggaguacaacugccccaaccugagccccagagaggagcccgacgacaucgacugcuggugcuacggcguggagaacgugagaguggccuacggcaagugcgacagcgccggcagaagcagaagaagcagaagagccaucgaccugcccacccacgagaaccacggccugaagaccagacaggagaaguggaugaccggcagaaugggcgagagacagcugcagaagaucgagagaugguucgugagaaaccccuucuucgccgugaccgcccugaccaucgccuaccuggugggcagcaacaugacccagagaguggugaucgcccugcuggugcuggccgugggccccgccuacagcgcccacugcaucggcaucaccgacagagacuucaucgagggcgugcacggcggcaccugggugagcgccacccuggagcaggacaagugcgugaccgugauggcccccgacaagcccagccuggacaucagccuggagaccguggccaucgacagacccgccgaggugagaaaggugugcuacaacgccgugcugacccacgugaagaucaacgacaagugccccagcaccggcgaggcccaccuggccgaggagaacgagggcgacaacgccugcaagagaaccuacagcgacagaggcuggggcaacggcugcggccuguucggcaagggcagcaucguggccugcgccaaguucaccugcgccaagagcaugagccuguucgagguggaccagaccaagauccaguacgugaucagagcccagcugcacgugggcgccaagcaggagaacuggaacaccgacaucaagacccugaaguucgacgcccugagcggcagccaggagguggaguucaucggcuacggcaaggccacccuggagugccaggugcagaccgccguggacuucggcaacagcuacaucgccgagauggagaccgagagcuggaucguggacagacagugggcccaggaccugacccugcccuggcagagcggcagcggcggcguguggagagagaugcaccaccugguggaguucgagcccccccacgccgccaccaucagagugcuggcccugggcaaccaggagggcagccugaagaccgcccugaccggcgccaugagagugaccaaggacaccaacgacaacaaccuguacaagcugcacggcggccacgugagcugcagagugaagcugagcgcccugacccugaagggcaccagcuacaagaucugcaccgacaagauguucuucgugaagaaccccaccgacaccggccacggcaccguggugaugcaggugaaggugagcaagggcgcccccugcagaauccccgugaucguggccgacgaccugaccgccgccaucaacaagggcauccuggugaccgugaaccccaucgccagcaccaacgacgacgaggugcugaucgaggugaacccccccuucggcgacagcuacaucaucgugggcagaggcgacagcagacugaccuaccaguggcacaaggagggcagcagcaucggcaagcuguucacccagaccaugaagggcguggagagacuggccgugaugggcgacaccgccugggacuucagcagcgccggcggcuucuucaccagcgugggcaagggcauccacaccguguucggcagcgccuuccagggccuguucggcggccugaacuggaucaccaaggugaucaugggcgccgugcugaucugggugggcaucaacaccagaaacaugaccaugagcaugagcaugauccuggugggcgugaucaugauguuccugagccugggcgugggcgccugaggacuagucccuguucccagagcccacuuuuuuuucuuuuuuugaaauaaaauagccugucuuucagaucuaaaaaaaaaaaaaaaaaaaaaaaaaaaaaaaaaaaaaaaaaaaaaaaaaaaaaaaaaaaaaaaaugcaucccccccccccccccccccccccccccccccaaaggcucuuuucagagccaccagaauu

SEQ ID NO: 1290 - RNA, 2416 nt, Artificial Sequence
  mRNA product Design a-4 comprising derived and/or modified sequence from YFV__NC_002031.1__X-SS-prME-XX (polyprotein: aa92-788) (opt5)
gggagacuccugucgggcggaaguaggaggaguagaguuuaaaaacaguacucuuuuuccgguucgggacguaguugaagcaacgacaagccggauaaccgcucuugagacaggaagcuuaccaugagaggccugagcucccggaagcgcagaucucacgacgugcucaccguccaguuccugauccuugggaugcugcucaugacaggaggcguuacgcuggugcggaaaaaccgcuggcuucugcucaaugugaccagcgaggaucuggggaagacauuuuccgucggaaccggcaacugcacaaccaauauucuggaagccaaauacuggugucccgacucuauggaguauaacugcccuaaucucagcccgagagaagaacccgaugacaucgauuguuggugcuacgggguggaaaacguucggguggcuuauggaaagugugacuccgccggccgcucuagacggagccgcagagcgauugaucugccuacacaugagaaucacggccuuaaaacccggcaagagaaguggaugacggggcgcaugggagaaagacagcugcagaagaucgagcggugguucguccgcaaccccuuuuucgcugugaccgcccucacaauugccuaccugguuggcuccaauaugacccagagaguggucaucgcccuucuggugcucgcuguggggccugcuuauagcgcccauugcaucggaauuacagaccgggauuuuaucgaaggcguccacgggggaaccuggguuucugcgacgcuggagcaagacaaaugugugacagugauggcccccgauaagccuucccuggacauuagccucgagaccgucgcuaucgauagaccggccgaagugcgcaaaguuugcuacaacgcugugcugacacaugucaagauuaaugacaaaugucccucuaccggcgaggcccaccuugcggaagagaacgaaggcgacaaugccugcaagcggaccuauuccgauagaggguggggaaacggcugugggcuguucggaaagggcagcaucguggcuugcgccaaauuuacaugcgcuaagucuaugucccucuucgagguugaccagacgaaaauucaguacgugauccgcgcccagcugcacgucggggccaagcaagagaauuggaacaccgauaucaaaacacuuaaguuugacgcucugagcggaucccaggaaguggaguucauuggcuacggcaaagcgacccucgaaugucagguccagacagccguggauuuugggaacucuuauaucgcugagauggaaaccgagagcuggauuguugaccggcaaugggcccaggaucugacgcugccuuggcaguccggaagcggcgggguguggagagagaugcaucaccucgucgaguucgagcccccucaugccgcuacaauccgcgugcuggcccuuggaaaucaagaaggcucucugaagaccgcgcucaccggggcuaugcggguuacaaaggacaccaacgauaauaaccuguacaaacuucacggcggacacguguccugcagagucaagcugagcgcccucacacugaaaggcacgucuuauaagauuuguaccgacaaaauguuuuucgugaagaaucccacagauaccgggcauggaacagugguuaugcaggucaaggugagcaaaggcgccccgugccgcaucccugugaucgucgcugacgaccugaccgccgcuauuaacaaggggauccucgugacgguuaaucccauugccuccaccaacgaugacgaggugcugaucgaagucaauccucccuucggagauucuuacauuaucgugggccggggagacagcagacuuacauaucaguggcacaaagagggcuccagcaucggaaagcuguuuacccagacaaugaaaggcguugagcgccucgcggugaugggggauaccgccugggacuucucuuccgcuggaggcuuuuucacgagcgucgggaaggggauucauacaguguuuggcucugccuuccaagggcuguuuggcggacugaacuggaucaccaagguuauuaugggcgcugugcuuaucugggucgggauuaauacacggaacaugaccauguccaugagcaugauccucgugggagugauuaugauguuccugucccugggcgucggggccgaucagggaugugcgaucaauuuuggcaaaugaggacuagucccuguucccagagcccacuuuuuuuucuuuuuuugaaauaaaauagccugucuuucagaucuaaaaaaaaaaaaaaaaaaaaaaaaaaaaaaaaaaaaaaaaaaaaaaaaaaaaaaaaaaaaaaaaugcaucccccccccccccccccccccccccccccccaaaggcucuuuucagagccaccagaauu

SEQ ID NO: 1291 - RNA, 2353 nt, Artificial Sequence
  mRNA product Design a-4 comprising derived and/or modified sequence from YFV__NC_002031.1__SS-prME (polyprotein: M,aa104-778) (opt5)
gggagacuccugucgggcggaaguaggaggaguagaguuuaaaaacaguacucuuuuuccgguucgggacguaguugaagcaacgacaagccggauaaccgcucuugagacaggaagcuuaccauggacgugcugaccguccaguuccucauccugggcaugcuucugaugacagggggaguuacgcucgugagaaagaaccgguggcugcuucugaaugugaccagcgaggaucucggcaaaacauuuuccgucgggaccggaaacugcacaaccaauauucuggaagccaaguacuggugucccgacucuauggaguauaacugcccuaaucugagcccgcgcgaagaacccgaugacaucgauuguuggugcuacggcguggaaaacguuagaguggcuuaugggaaaugugacuccgccggacggucucgcagaagccggcgcgcgauugaucucccuacacacgagaaucauggccugaagaccagacaagagaaauggaugacgggccggaugggggaacgccagcuucagaagaucgagagaugguucguccggaaccccuuuuucgcugugaccgcccugacaauugccuaccucguuggauccaauaugacccagcgcguggucaucgcucugcuugugcuggccgugggcccugcuuauucugcccacugcaucgggauuacagacagagauuuuaucgaaggaguccauggcgggaccuggguuagcgcgacgcucgagcaagacaagugugugacagugauggcccccgauaaaccuucccuggacauuagccuggagaccgucgcuaucgaucggccggccgaagugcgcaagguuugcuacaacgcugugcucacacacgucaaaauuaaugacaagugucccucuaccggagaggcccaucuggcggaagagaacgaaggcgacaaugccugcaaaagaaccuauuccgaucggggcugggggaacggauguggccuuuucgggaagggaagcaucguggcuugcgccaaguuuacaugcgcuaaaucuaugucccuguucgagguugaccagacgaagauucaguacgugaucagagcccagcuccacgucggcgccaaacaagagaauuggaacaccgauaucaagacacugaaauuugacgcucuuagcgggucucaggaaguggaguucauuggauacggcaaggcgacccuggaaugucagguccagacagccguggauuuuggcaacuccuauaucgcugagauggaaaccgagagcuggauuguugaccgccaaugggcccaggaucucacgcugccuuggcaguccgggucuggaggcguguggcgggagaugcaccaucuggucgaguucgagcccccucacgccgcuacaaucagagugcucgcccuggggaaucaagaaggaagccuuaaaaccgcgcugaccggcgcuaugcgcguuacaaaggacaccaacgauaauaaccucuacaagcugcaugggggccacguguccugccgggucaaacuuagcgcccugacacucaagggaacgucuuauaaaauuuguaccgacaagauguuuuucgugaaaaaucccacagauaccggccacgggacagugguuaugcaggucaagguguccaagggagccccgugcagaaucccugugaucgucgcugacgaccugaccgccgcuauuaacaaaggcauccuggugacgguuaaucccauugccagcaccaacgaugacgaggugcucaucgaagucaauccucccuucggggauucuuacauuaucgugggacgcggcgacagccggcugacauaucaguggcauaaggagggguccucuaucggcaaacuuuuuacccagacaaugaagggaguugagagacuggcggugaugggcgauaccgccugggacuucagcuccgcugggggauuuuucacgagcgucggcaaagggauucacacaguguuuggaucugccuuccaaggccucuuugggggccugaacuggaucaccaagguuauuaugggagcugugcugaucugggucggcauuaauacacgcaacaugaccauguccaugagcaugauccuugugggggugauuaugauguuccucucucugggagucggcgccugaggacuagucccuguucccagagcccacuuuuuuuucuuuuuuugaaauaaaauagccugucuuucagaucuaaaaaaaaaaaaaaaaaaaaaaaaaaaaaaaaaaaaaaaaaaaaaaaaaaaaaaaaaaaaaaaaugcaucccccccccccccccccccccccccccccccaaaggcucuuuucagagccaccagaauu

SEQ ID NO: 1292 - RNA, 2380 nt, Artificial Sequence
  mRNA product Design a-4 comprising derived and/or modified sequence from YFV__NC_002031.1__SSIgE-prME-XX (polyprotein: aa122-788) (opt5)
gggagacuccugucgggcggaaguaggaggaguagaguuuaaaaacaguacucuuuuuccgguucgggacguaguugaagcaacgacaagccggauaaccgcucuugagacaggaagcuuaccauggacuggaccuggauccuguuccucguggccgcugccacaagaguccacagcguuacgcuggugcggaaaaaccgcuggcuucugcucaaugugaccagcgaggaucuggggaagacauuuuccgucggaaccggcaacugcacaaccaauauucuggaagccaaauacuggugucccgacucuauggaguauaacugcccuaaucucagcccgagagaagaacccgaugacaucgauuguuggugcuacgggguggaaaacguucggguggcuuauggaaagugugacuccgccggccgcucuagacggagccgcagagcgauugaucugccuacacaugagaaucacggccuuaaaacccggcaagagaaguggaugacggggcgcaugggagaaagacagcugcagaagaucgagcggugguucguccgcaaccccuuuuucgcugugaccgcccucacaauugccuaccugguuggcuccaauaugacccagagaguggucaucgcccuucuggugcucgcuguggggccugcuuauagcgcccauugcaucggaauuacagaccgggauuuuaucgaaggcguccacgggggaaccuggguuucugcgacgcuggagcaagacaaaugugugacagugauggcccccgauaagccuucccuggacauuagccucgagaccgucgcuaucgauagaccggccgaagugcgcaaaguuugcuacaacgcugugcugacacaugucaagauuaaugacaaaugucccucuaccggcgaggcccaccuugcggaagagaacgaaggcgacaaugccugcaagcggaccuauuccgauagaggguggggaaacggcugugggcuguucggaaagggcagcaucguggcuugcgccaaauuuacaugcgcuaagucuaugucccucuucgagguugaccagacgaaaauucaguacgugauccgcgcccagcugcacgucggggccaagcaagagaauuggaacaccgauaucaaaacacuuaaguuugacgcucugagcggaucccaggaaguggaguucauuggcuacggcaaagcgacccucgaaugucagguccagacagccguggauuuugggaacucuuauaucgcugagauggaaaccgagagcuggauuguugaccggcaaugggcccaggaucugacgcugccuuggcaguccggaagcggcgggguguggagagagaugcaucaccucgucgaguucgagcccccucaugccgcuacaauccgcgugcuggcccuuggaaaucaagaaggcucucugaagaccgcgcucaccggggcuaugcggguuacaaaggacaccaacgauaauaaccuguacaaacuucacggcggacacguguccugcagagucaagcugagcgcccucacacugaaaggcacgucuuauaagauuuguaccgacaaaauguuuuucgugaagaaucccacagauaccgggcauggaacagugguuaugcaggucaaggugagcaaaggcgccccgugccgcaucccugugaucgucgcugacgaccugaccgccgcuauuaacaaggggauccucgugacgguuaaucccauugccuccaccaacgaugacgaggugcugaucgaagucaauccucccuucggagauucuuacauuaucgugggccggggagacagcagacuuacauaucaguggcacaaagagggcuccagcaucggaaagcuguuuacccagacaaugaaaggcguugagcgccucgcggugaugggggauaccgccugggacuucucuuccgcuggaggcuuuuucacgagcgucgggaaggggauucauacaguguuuggcucugccuuccaagggcuguuuggcggacugaacuggaucaccaagguuauuaugggcgcugugcuuaucugggucgggauuaauacacggaacaugaccauguccaugagcaugauccucgugggagugauuaugauguuccugucccugggcgucggggccgaucagggaugugcgaucaauuuuggcaaaugaggacuagucccuguucccagagcccacuuuuuuuucuuuuuuugaaauaaaauagccugucuuucagaucuaaaaaaaaaaaaaaaaaaaaaaaaaaaaaaaaaaaaaaaaaaaaaaaaaaaaaaaaaaaaaaaaugcaucccccccccccccccccccccccccccccccaaaggcucuuuucagagccaccagaauu

SEQ ID NO: 1293 - RNA, 2350 nt, Artificial Sequence
  mRNA product Design a-4 comprising derived and/or modified sequence from YFV__NC_002031.1__SSIgE-prME (polyprotein: aa122-778) (opt5)
gggagacuccugucgggcggaaguaggaggaguagaguuuaaaaacaguacucuuuuuccgguucgggacguaguugaagcaacgacaagccggauaaccgcucuugagacaggaagcuuaccauggacuggaccuggauccuguuccucguggccgcugccacaagaguccacagcgugacccuggucagaaagaaccgguggcuccugcuuaauguuacaagcgaggaccugggcaaaacguucuccguggggaccggaaacugcacaaccaauauccucgaagccaaguacuggugucccgauucuauggaguauaacugcccuaaucugagcccgcgcgaggaacccgacgauauugacuguuggugcuacggcguggaaaacgucagaguggcuuaugggaaaugugauuccgccggacggucucgcagaagccggcgcgcgaucgaccuuccuacacacgagaaucauggccugaagaccagacaggagaaauggaugacagggcggaugggagaacgccaacuccagaagauugagagaugguuuguucggaaccccuucuuugcugugaccgcccugacgaucgccuaccuggucggcuccaauaugacccagcgcgugguuauugcucuccuggugcuugccgucggcccugcuuauucugcccacugcaucgggaucacagauagagacuucauugaaggagugcauggcgggaccugggugagcgcgacacuggagcaggauaagugugucaccguuauggcccccgacaaaccuucccucgauaucagccuggagacgguggcuauugaccggccggccgaagugcgcaaggucugcuacaacgcugugcuuacacacguuaaaaucaaugauaagugucccucuaccggagaggcccaucuggcggaagagaacgaaggcgacaaugccugcaaaagaacauauuccgaccggggguggggaaacggcuguggccucuuugggaagggaagcauuguggcuugcgccaaguuuaccugcgcuaaaucuaugucccuguucgaggucgaucaaaccaagauccaguacgugauuagagcccagcugcacguuggcgccaaacaggagaauuggaacacagacaucaagacgcucaaauucgaugcucugagcgggucucaagaaguggaguuuaucggauacggcaaggcgacccuugaaugucagguccagacagccguggacuucgggaacuccuauauugcugagauggaaaccgagagcuggaucgucgaucgccagugggcccaagaccugacacucccuuggcaguccggaucuggcggcguguggcgggagaugcaccaucugguugaauuugagcccccucacgccgcuaccauuagagugcuugcccuggggaaucaggaaggaagccucaaaacggcgcugacaggcgcuaugcgcgucaccaaggauaccaacgacaauaaccuguacaagcuccaugggggacacguguccugccggguuaaacugagcgcccuuacacugaagggcaccucuuauaaaaucuguacagauaagauguucuuugugaaaaaucccacggacaccgggcacggcacagucgugaugcaagugaagguuuccaagggagccccgugccgcauuccugucaucguggcugaugaccucaccgccgcuaucaacaaaggcauucuggugacagucaaucccaucgccagcaccaacgacgaugaggugcuuauugaaguuaauccucccuucggggacucuuacaucauugugggaagaggcgauagccggcugacguaucaguggcauaaggagggguccucuaucggaaaacucuucacccagacaaugaagggcgucgagagacuggcggugaugggggacaccgccugggauuuuagcuccgcuggcggauucuuuacaagcguuggcaaagggauccacaccguguucggaucugccuuucagggccuguucgggggacucaacuggauuacgaaggucaucaugggcgcugugcugauuuggguugggaucaauacacgcaacaugaccauguccaugagcaugauucuugugggcgucaucaugauguuucugucucucggagugggcgccugaggacuagucccuguucccagagcccacuuuuuuuucuuuuuuugaaauaaaauagccugucuuucagaucuaaaaaaaaaaaaaaaaaaaaaaaaaaaaaaaaaaaaaaaaaaaaaaaaaaaaaaaaaaaaaaaaugcaucccccccccccccccccccccccccccccccaaaggcucuuuucagagccaccagaauu

SEQ ID NO: 1294 - RNA, 2398 nt, Artificial Sequence
  mRNA product Design a-4 comprising derived and/or modified sequence from YFV__NC_002031.1__SSjev-prME-XX (polyprotein: aa122-788) (opt5)
gggagacuccugucgggcggaaguaggaggaguagaguuuaaaaacaguacucuuuuuccgguucgggacguaguugaagcaacgacaagccggauaaccgcucuugagacaggaagcuuaccaugggcaagagaagcgccggguccaucauguggcuggcuucucucgccguggucauugcgugcgcuggagccguuacgcuggugcggaaaaaccgcuggcuucugcucaaugugaccagcgaggaucuggggaagacauuuuccgucggaaccggcaacugcacaaccaauauucuggaagccaaauacuggugucccgacucuauggaguauaacugcccuaaucucagcccgagagaagaacccgaugacaucgauuguuggugcuacgggguggaaaacguucggguggcuuauggaaagugugacuccgccggccgcucuagacggagccgcagagcgauugaucugccuacacaugagaaucacggccuuaaaacccggcaagagaaguggaugacggggcgcaugggagaaagacagcugcagaagaucgagcggugguucguccgcaaccccuuuuucgcugugaccgcccucacaauugccuaccugguuggcuccaauaugacccagagaguggucaucgcccuucuggugcucgcuguggggccugcuuauagcgcccauugcaucggaauuacagaccgggauuuuaucgaaggcguccacgggggaaccuggguuucugcgacgcuggagcaagacaaaugugugacagugauggcccccgauaagccuucccuggacauuagccucgagaccgucgcuaucgauagaccggccgaagugcgcaaaguuugcuacaacgcugugcugacacaugucaagauuaaugacaaaugucccucuaccggcgaggcccaccuugcggaagagaacgaaggcgacaaugccugcaagcggaccuauuccgauagaggguggggaaacggcugugggcuguucggaaagggcagcaucguggcuugcgccaaauuuacaugcgcuaagucuaugucccucuucgagguugaccagacgaaaauucaguacgugauccgcgcccagcugcacgucggggccaagcaagagaauuggaacaccgauaucaaaacacuuaaguuugacgcucugagcggaucccaggaaguggaguucauuggcuacggcaaagcgacccucgaaugucagguccagacagccguggauuuugggaacucuuauaucgcugagauggaaaccgagagcuggauuguugaccggcaaugggcccaggaucugacgcugccuuggcaguccggaagcggcgggguguggagagagaugcaucaccucgucgaguucgagcccccucaugccgcuacaauccgcgugcuggcccuuggaaaucaagaaggcucucugaagaccgcgcucaccggggcuaugcggguuacaaaggacaccaacgauaauaaccuguacaaacuucacggcggacacguguccugcagagucaagcugagcgcccucacacugaaaggcacgucuuauaagauuuguaccgacaaaauguuuuucgugaagaaucccacagauaccgggcauggaacagugguuaugcaggucaaggugagcaaaggcgccccgugccgcaucccugugaucgucgcugacgaccugaccgccgcuauuaacaaggggauccucgugacgguuaaucccauugccuccaccaacgaugacgaggugcugaucgaagucaauccucccuucggagauucuuacauuaucgugggccggggagacagcagacuuacauaucaguggcacaaagagggcuccagcaucggaaagcuguuuacccagacaaugaaaggcguugagcgccucgcggugaugggggauaccgccugggacuucucuuccgcuggaggcuuuuucacgagcgucgggaaggggauucauacaguguuuggcucugccuuccaagggcuguuuggcggacugaacuggaucaccaagguuauuaugggcgcugugcuuaucugggucgggauuaauacacggaacaugaccauguccaugagcaugauccucgugggagugauuaugauguuccugucccugggcgucggggccgaucagggaugugcgaucaauuuuggcaaaugaggacuagucccuguucccagagcccacuuuuuuuucuuuuuuugaaauaaaauagccugucuuucagaucuaaaaaaaaaaaaaaaaaaaaaaaaaaaaaaaaaaaaaaaaaaaaaaaaaaaaaaaaaaaaaaaaugcaucccccccccccccccccccccccccccccccaaaggcucuuuucagagccaccagaauu

SEQ ID NO: 1295 - RNA, 2368 nt, Artificial Sequence
  mRNA product Design a-4 comprising derived and/or modified sequence from YFV__NC_002031.1__SSjev-prME (polyprotein: aa122-778) (opt5)
gggagacuccugucgggcggaaguaggaggaguagaguuuaaaaacaguacucuuuuuccgguucgggacguaguugaagcaacgacaagccggauaaccgcucuugagacaggaagcuuaccaugggcaagagaagcgccggguccaucauguggcuggcuucucucgccguggucauugcgugcgcuggagccgugacccuggucagaaagaaccgguggcuccugcuuaauguuacaagcgaggaccugggcaaaacguucuccguggggaccggaaacugcacaaccaauauccucgaagccaaguacuggugucccgauucuauggaguauaacugcccuaaucugagcccgcgcgaggaacccgacgauauugacuguuggugcuacggcguggaaaacgucagaguggcuuaugggaaaugugauuccgccggacggucucgcagaagccggcgcgcgaucgaccuuccuacacacgagaaucauggccugaagaccagacaggagaaauggaugacagggcggaugggagaacgccaacuccagaagauugagagaugguuuguucggaaccccuucuuugcugugaccgcccugacgaucgccuaccuggucggcuccaauaugacccagcgcgugguuauugcucuccuggugcuugccgucggcccugcuuauucugcccacugcaucgggaucacagauagagacuucauugaaggagugcauggcgggaccugggugagcgcgacacuggagcaggauaagugugucaccguuauggcccccgacaaaccuucccucgauaucagccuggagacgguggcuauugaccggccggccgaagugcgcaaggucugcuacaacgcugugcuuacacacguuaaaaucaaugauaagugucccucuaccggagaggcccaucuggcggaagagaacgaaggcgacaaugccugcaaaagaacauauuccgaccggggguggggaaacggcuguggccucuuugggaagggaagcauuguggcuugcgccaaguuuaccugcgcuaaaucuaugucccuguucgaggucgaucaaaccaagauccaguacgugauuagagcccagcugcacguuggcgccaaacaggagaauuggaacacagacaucaagacgcucaaauucgaugcucugagcgggucucaagaaguggaguuuaucggauacggcaaggcgacccuugaaugucagguccagacagccguggacuucgggaacuccuauauugcugagauggaaaccgagagcuggaucgucgaucgccagugggcccaagaccugacacucccuuggcaguccggaucuggcggcguguggcgggagaugcaccaucugguugaauuugagcccccucacgccgcuaccauuagagugcuugcccuggggaaucaggaaggaagccucaaaacggcgcugacaggcgcuaugcgcgucaccaaggauaccaacgacaauaaccuguacaagcuccaugggggacacguguccugccggguuaaacugagcgcccuuacacugaagggcaccucuuauaaaaucuguacagauaagauguucuuugugaaaaaucccacggacaccgggcacggcacagucgugaugcaagugaagguuuccaagggagccccgugccgcauuccugucaucguggcugaugaccucaccgccgcuaucaacaaaggcauucuggugacagucaaucccaucgccagcaccaacgacgaugaggugcuuauugaaguuaauccucccuucggggacucuuacaucauugugggaagaggcgauagccggcugacguaucaguggcauaaggagggguccucuaucggaaaacucuucacccagacaaugaagggcgucgagagacuggcggugaugggggacaccgccugggauuuuagcuccgcuggcggauucuuuacaagcguuggcaaagggauccacaccguguucggaucugccuuucagggccuguucgggggacucaacuggauuacgaaggucaucaugggcgcugugcugauuuggguugggaucaauacacgcaacaugaccauguccaugagcaugauucuugugggcgucaucaugauguuucugucucucggagugggcgccugaggacuagucccuguucccagagcccacuuuuuuuucuuuuuuugaaauaaaauagccugucuuucagaucuaaaaaaaaaaaaaaaaaaaaaaaaaaaaaaaaaaaaaaaaaaaaaaaaaaaaaaaaaaaaaaaaugcaucccccccccccccccccccccccccccccccaaaggcucuuuucagagccaccagaauu

SEQ ID NO: 1296 - RNA, 2416 nt, Artificial Sequence
  mRNA product Design a-4 comprising derived and/or modified sequence from YFV__NC_002031.1__X-SS-prME-XX (polyprotein: aa92-788) (opt6)
gggagacuccugucgggcggaaguaggaggaguagaguuuaaaaacaguacucuuuuuccgguucgggacguaguugaagcaacgacaagccggauaaccgcucuugagacaggaagcuuaccaugagaggauuaucaaguagaaaaagaagaucacaugauguacuaaccgugcaauuuuugaucuuagggaugcucuuaaugacaggagguguuacauuaguaagaaagaaucgauggcugcuuuuaaaugugacaucagaggauuuagggaaaacauuuucgguaggaacaggaaauuguacuacaaauauacuugaagcaaaauauuggugcccagacucuauggaauauaauuguccaaauuuaaguccuagagaagaaccugacgauauagauuguugguguuaugguguagaaaauguaagaguagcauacggcaaaugcgauagugcaggacguucuagacguucaaggagagccauagaucugcccacucacgaaaaucacggauugaaaacacgacaagaaaaauggaugacugggcgaaugggagaaagacaacuacagaaaauugaaagaugguucguuagaaauccauucuuugccguaacagcuuuaacaauagccuauuuaguagguaguaauaugacacaaagaguaguaauagcauugcuaguguuagcaguuggaccagcuuauagugcacauugcauaggaauaacagauagagacuuuauagaaggaguacacgggggaacuuggguaagugccacuuuagaacaagauaaauguguuacagugauggcgccagauaaaccaagucuggacauaaguuuggaaacaguagcgauugauagacccgcagaaguaagaaaaguuuguuauaaugcuguucuaacccauguuaaaauaaaugauaaaugcccuagcaccggagaagcccaucuagcagaagaaaaugaaggagauaacgcauguaaacgaacauacucagauagaggauggggcaacggauguggcuuguuuggaaaagguagcauaguagcaugcgcuaaauuuacaugcgcaaagucaaugucauuauuugaaguagaucaaacaaaaauacaauauguaauaagagcucaauuacacgugggugcaaaacaagaaaauuggaauacagacauaaagacacuaaaguucgacgcauuaaguggaucacaagagguagaauuuauaggguacggaaaagcgacuuuagagugucaaguccaaacagcaguagauuucgguaacucauacauagcagaaauggaaacugaaaguuggauaguagauagacaaugggcacaagacuugacacuaccuuggcaaucaggaagcggaggaguauggagagaaaugcaucauuuaguagaauuugaaccaccucaugcagcaacaauaagaguauuagcccuaggaaaccaagaaggaaguuuaaaaacagcacuaacaggagcuaugagaguaacaaaagauacaaaugacaacaaucuauacaaauuacacggaggacauguaagcugccggguaaaguugagcgcacuaacauuaaaaggaacgaguuauaaaauaugcacagauaaaauguucuuuguuaaaaauccuacagauaccggucauggaacaguaguaaugcaaguaaaaguaaguaaaggcgcucccuguagaauaccuguaauagucgcagacgauuuaaccgcagcaauaaauaaaggaauauuagucacgguaaacccaauagcgucaacaaaugaugaugaaguauuaauagaaguuaacccaccuuuuggagacaguuauauaauagucggaaggggugauaguagacuaacauaccaauggcauaaagaaggaagcucaauaggaaaauuauuuacucaaaccaugaaagguguagaaaggcuagcuguuaugggugacacagcaugggauuuuucaagcgcaggaggguucuuuacaucaguagguaaaggaauacauacaguauuuggaagugcauuucaaggauuauuuggugguuuaaauuggauaacaaaaguaauaaugggcgcaguuuuaauauggguagguauaaacacaagaaauaugacaaugucuaugaguaugauauuggucggaguaauaaugauguuuuuaucacuaggagugggugcagaucaagguugcgcuauuaauuuuggaaaaugaggacuagucccuguucccagagcccacuuuuuuuucuuuuuuugaaauaaaauagccugucuuucagaucuaaaaaaaaaaaaaaaaaaaaaaaaaaaaaaaaaaaaaaaaaaaaaaaaaaaaaaaaaaaaaaaaugcaucccccccccccccccccccccccccccccccaaaggcucuuuucagagccaccagaauu

SEQ ID NO: 1297 - RNA, 2353 nt, Artificial Sequence
  mRNA product Design a-4 comprising derived and/or modified sequence from YFV__NC_002031.1__SS-prME (polyprotein: M,aa104-778) (opt6)
gggagacuccugucgggcggaaguaggaggaguagaguuuaaaaacaguacucuuuuuccgguucgggacguaguugaagcaacgacaagccggauaaccgcucuugagacaggaagcuuaccauggauguucuaacaguacaauuuuuaauauuagggauguuauuaaugacaggaggcguaacauuaguacgaaagaaucgauggcuauuacuaaacguuacgucugaagauuuaggaaaaacauuuagcguaggaacaggaaauugcaccacgaauaucuuagaagcaaaauauugguguccagauaguauggaauacaauuguccaaauuuaaguccuagagaggaacccgacgauauagauugcugguguuacggaguggaaaauguaagaguagcauauggaaaaugugacagcgcagguagaaguagaagaucacgacgagcaauugaucuacccacucaugagaaccauggacuaaaaacaagacaagaaaaauggaugacagguagaaugggcgaaagacaauuacagaaaauagaaagaugguuuguacgaaauccuuucuuugcugucacugcauuaacuauagcuuauuuaguaggaaguaacaugacucaaagaguaguaauagcacuauuaguacuagcaguaggaccagcuuacagugcacacuguauagggauaacggauagagauuuuauagaaggaguacauggggguacaugggugucugccacuuuagaacaagacaaauguguuacaguuauggccccagauaaacccucuuuagacauaucauuagaaacuguagcaauagauagaccggcggaagugagaaagguauguuauaaugcaguacuaacccauguaaaaauuaaugacaaaugcccaucaacaggagaggcucaucuagcugaagaaaaugaaggagacaaugcuugcaaacguacauauucagacaggggguggggaaauggauguggauuauuugguaaagggucaauaguagcaugugcaaaauuuacaugcgcaaaaaguaugagcuuauuugaaguagaucaaacaaaaauccaauauguaauuagagcucaacuucacguaggagcaaaacaagagaauuggaacacagauauaaaaacauuaaaauuugacgcuuugucuggaagucaagaagucgaauuuauuggcuauggaaaggcaacauuagaaugccaaguucaaaccgcaguagauuuuggaaauucauacauagcagaaauggagacugaaaguuggauaguagauagacagugggcucaagaccuaacuuuaccauggcaaucaggaaguggugguguauggagagaaaugcaucauuuaguagaauuugaaccaccacaugcagcaacaauuagaguacuagcauuaggaaaucaagaagguaguuuaaagacagcgcuuaccggagcaaugagaguuacaaaagauacuaaugacaauaauuuauauaaacuucauggaggacauguuagcuguagagucaaauuaagugcauuaacacucaaaggaacaucauacaaaauauguacagauaaaauguuuuucgucaagaauccaacagauacaggacauggaacaguuguaaugcaaguaaaaguaucaaaaggagcaccuugcagaauaccaguaauaguagcagaugauuuaacagccgcaauuaauaaagggauauuaguaacaguaaacccuauagcaaguacaaaugaugaugaagucuugauagaaguaaauccaccauuuggagauucguauauaauagucggaagaggagauagucgauuaacauaucaauggcauaaagaagguucaucaauaggaaaauuauuuacacaaaccaugaaaggaguugaaagauuagcuguaaugggggacacagcuugggauuuuucuagcgcaggaggauucuuuacauccguaggaaaagguauacacacaguauuuggcucagcauuccaaggguuauuuggugguuuaaauuggauaacaaaagugauuaugggagcagugcuaaucuggguaggaauaaauacaagaaauaugacaaugaguaugagcaugauucucguaggaguaauaaugauguuccuuaguuugggaguuggcgcuugaggacuagucccuguucccagagcccacuuuuuuuucuuuuuuugaaauaaaauagccugucuuucagaucuaaaaaaaaaaaaaaaaaaaaaaaaaaaaaaaaaaaaaaaaaaaaaaaaaaaaaaaaaaaaaaaaugcaucccccccccccccccccccccccccccccccaaaggcucuuuucagagccaccagaauu

SEQ ID NO: 1298 - RNA, 2380 nt, Artificial Sequence
  mRNA product Design a-4 comprising derived and/or modified sequence from YFV__NC_002031.1__SSIgE-prME-XX (polyprotein: aa122-788) (opt6)
gggagacuccugucgggcggaaguaggaggaguagaguuuaaaaacaguacucuuuuuccgguucgggacguaguugaagcaacgacaagccggauaaccgcucuugagacaggaagcuuaccauggacuggacauggauauuauuuuuaguagcagcagcaacaagaguacauucaguuacauuaguaagaaagaaucgauggcugcuuuuaaaugugacaucagaggauuuagggaaaacauuuucgguaggaacaggaaauuguacuacaaauauacuugaagcaaaauauuggugcccagacucuauggaauauaauuguccaaauuuaaguccuagagaagaaccugacgauauagauuguugguguuaugguguagaaaauguaagaguagcauacggcaaaugcgauagugcaggacguucuagacguucaaggagagccauagaucugcccacucacgaaaaucacggauugaaaacacgacaagaaaaauggaugacugggcgaaugggagaaagacaacuacagaaaauugaaagaugguucguuagaaauccauucuuugccguaacagcuuuaacaauagccuauuuaguagguaguaauaugacacaaagaguaguaauagcauugcuaguguuagcaguuggaccagcuuauagugcacauugcauaggaauaacagauagagacuuuauagaaggaguacacgggggaacuuggguaagugccacuuuagaacaagauaaauguguuacagugauggcgccagauaaaccaagucuggacauaaguuuggaaacaguagcgauugauagacccgcagaaguaagaaaaguuuguuauaaugcuguucuaacccauguuaaaauaaaugauaaaugcccuagcaccggagaagcccaucuagcagaagaaaaugaaggagauaacgcauguaaacgaacauacucagauagaggauggggcaacggauguggcuuguuuggaaaagguagcauaguagcaugcgcuaaauuuacaugcgcaaagucaaugucauuauuugaaguagaucaaacaaaaauacaauauguaauaagagcucaauuacacgugggugcaaaacaagaaaauuggaauacagacauaaagacacuaaaguucgacgcauuaaguggaucacaagagguagaauuuauaggguacggaaaagcgacuuuagagugucaaguccaaacagcaguagauuucgguaacucauacauagcagaaauggaaacugaaaguuggauaguagauagacaaugggcacaagacuugacacuaccuuggcaaucaggaagcggaggaguauggagagaaaugcaucauuuaguagaauuugaaccaccucaugcagcaacaauaagaguauuagcccuaggaaaccaagaaggaaguuuaaaaacagcacuaacaggagcuaugagaguaacaaaagauacaaaugacaacaaucuauacaaauuacacggaggacauguaagcugccggguaaaguugagcgcacuaacauuaaaaggaacgaguuauaaaauaugcacagauaaaauguucuuuguuaaaaauccuacagauaccggucauggaacaguaguaaugcaaguaaaaguaaguaaaggcgcucccuguagaauaccuguaauagucgcagacgauuuaaccgcagcaauaaauaaaggaauauuagucacgguaaacccaauagcgucaacaaaugaugaugaaguauuaauagaaguuaacccaccuuuuggagacaguuauauaauagucggaaggggugauaguagacuaacauaccaauggcauaaagaaggaagcucaauaggaaaauuauuuacucaaaccaugaaagguguagaaaggcuagcuguuaugggugacacagcaugggauuuuucaagcgcaggaggguucuuuacaucaguagguaaaggaauacauacaguauuuggaagugcauuucaaggauuauuuggugguuuaaauuggauaacaaaaguaauaaugggcgcaguuuuaauauggguagguauaaacacaagaaauaugacaaugucuaugaguaugauauuggucggaguaauaaugauguuuuuaucacuaggagugggugcagaucaagguugcgcuauuaauuuuggaaaaugaggacuagucccuguucccagagcccacuuuuuuuucuuuuuuugaaauaaaauagccugucuuucagaucuaaaaaaaaaaaaaaaaaaaaaaaaaaaaaaaaaaaaaaaaaaaaaaaaaaaaaaaaaaaaaaaaugcaucccccccccccccccccccccccccccccccaaaggcucuuuucagagccaccagaauu

SEQ ID NO: 1299 - RNA, 2350 nt, Artificial Sequence
  mRNA product Design a-4 comprising derived and/or modified sequence from YFV__NC_002031.1__SSIgE-prME (polyprotein: aa122-778) (opt6)
gggagacuccugucgggcggaaguaggaggaguagaguuuaaaaacaguacucuuuuuccgguucgggacguaguugaagcaacgacaagccggauaaccgcucuugagacaggaagcuuaccauggacuggacauggauauuauuuuuaguagcagcagcaacaagaguacauucaguaacauuagucagaaagaacagaugguuauuacugaacguaacaagugaagacuuaggaaaaacauuuaguguaggcacaggaaauugcacaacaaauauacuugaagcaaaauauugguguccagauagcauggaauauaauuguccaaauuuaucaccuagagaggaacccgaugauauagauuguugguguuauggaguugaaaacgugcgaguagcauaugguaaaugugauagcgcaggaagaaguagaagaaguagaagggcaauagacuuaccaacucaugaaaaccauggauuaaaaacaagacaggaaaaauggaugacaggaagaaugggagaacgacaauuacagaaaauagaaagaugguucguaagaaauccauucuuugcaguaacagcauuaacaauagcauaucuaguuggaaguaacaugacucaaagaguaguaauagcauuguuaguacuagcaguaggaccggcuuauagcgcacauuguauagggauaacagauagagacuuuauagaaggagugcacgguggaacauggguuucagcaacgcuagagcaagauaaauguguaacgguaauggcgccggauaaaccaagccuugacauaucacuagaaacgguugcaaucgaucgaccagccgaaguaagaaaaguaugcuauaaugcggucuuaacacacguaaaaauaaaugauaaauguccuucaacgggagaagcacauuuagcagaagaaaacgaaggagacaacgcguguaaaagaacauauucagauaggggcuggggaaacggcugcgguuuauuuggaaaaggaaguauaguagcaugcgcaaaauuuacuugcgcaaaaaguaugaguuuauucgaaguugaucaaacaaagauacaauauguaauacgagcacaauuacauguaggugcaaagcaagaaaauuggaauacagacauaaaaacauugaaauuugacgcuuugaguggaucacaagaaguagaauuuauaggauacggaaaagcuacauuagaaugucaaguacaaacugcaguagauuuuggaaauucguauauagcagaaauggaaacugaaucauggauuguagauaggcaaugggcacaagauuuaaccuugccauggcaaagcggaagcggggguguauggcgggaaaugcaucauuuaguagaguucgaacccccacacgcggcuaccauaagaguacuagcauuaggaaaucaagaagggagucucaagacagcacucacaggugcaaugcgaguaacgaaagauacaaaugacaauaaucuauacaaacuacacggaggacauguaucuugcagaguaaaauuaucugcauuaacacuaaaagggacaaguuacaaaauuuguacagauaagauguucuuugucaaaaacccaacagacacgggacacggaacgguagucaugcaaguuaaaguaagcaaaggagcgccaugcagaauaccaguaaucgucgcagaugauuuaacagccgcaauaaauaaagguauauuaguaacgguaaauccaauagcgaguaccaaugaugaugaaguacuaauagaagugaacccaccauuuggugauagcuauauaauaguagggcgaggagauucaagauuaacauaucaauggcauaaagaagguaguaguauaggaaaauuauuuacacaaacuaugaaaggcguagaaagacuagcagucaugggagauacagcaugggauuucucaagugcaggcggauuuuucacaagcgucggaaaaggaauacauacaguguuugguagugcguuucaaggauuauucggaggacuaaauuggauaacgaaaguaauuaugggagcaguucucauaugggucggaauaaauacaaggaacaugacuaugaguaugagcaugauccuaguaggaguaauaaugauguuucuaagccuaggcguuggugcaugaggacuagucccuguucccagagcccacuuuuuuuucuuuuuuugaaauaaaauagccugucuuucagaucuaaaaaaaaaaaaaaaaaaaaaaaaaaaaaaaaaaaaaaaaaaaaaaaaaaaaaaaaaaaaaaaaugcaucccccccccccccccccccccccccccccccaaaggcucuuuucagagccaccagaauu

SEQ ID NO: 1300 - RNA, 2398 nt, Artificial Sequence
  mRNA product Design a-4 comprising derived and/or modified sequence from YFV__NC_002031.1__SSjev-prME-XX (polyprotein: aa122-788) (opt6)
gggagacuccugucgggcggaaguaggaggaguagaguuuaaaaacaguacucuuuuuccgguucgggacguaguugaagcaacgacaagccggauaaccgcucuugagacaggaagcuuaccaugggaaaaagaagugcaggaaguauaaugugguuggcaaguuuagcaguaguaauagcaugugcaggagcaguuacauuaguaagaaagaaucgauggcugcuuuuaaaugugacaucagaggauuuagggaaaacauuuucgguaggaacaggaaauuguacuacaaauauacuugaagcaaaauauuggugcccagacucuauggaauauaauuguccaaauuuaaguccuagagaagaaccugacgauauagauuguugguguuaugguguagaaaauguaagaguagcauacggcaaaugcgauagugcaggacguucuagacguucaaggagagccauagaucugcccacucacgaaaaucacggauugaaaacacgacaagaaaaauggaugacugggcgaaugggagaaagacaacuacagaaaauugaaagaugguucguuagaaauccauucuuugccguaacagcuuuaacaauagccuauuuaguagguaguaauaugacacaaagaguaguaauagcauugcuaguguuagcaguuggaccagcuuauagugcacauugcauaggaauaacagauagagacuuuauagaaggaguacacgggggaacuuggguaagugccacuuuagaacaagauaaauguguuacagugauggcgccagauaaaccaagucuggacauaaguuuggaaacaguagcgauugauagacccgcagaaguaagaaaaguuuguuauaaugcuguucuaacccauguuaaaauaaaugauaaaugcccuagcaccggagaagcccaucuagcagaagaaaaugaaggagauaacgcauguaaacgaacauacucagauagaggauggggcaacggauguggcuuguuuggaaaagguagcauaguagcaugcgcuaaauuuacaugcgcaaagucaaugucauuauuugaaguagaucaaacaaaaauacaauauguaauaagagcucaauuacacgugggugcaaaacaagaaaauuggaauacagacauaaagacacuaaaguucgacgcauuaaguggaucacaagagguagaauuuauaggguacggaaaagcgacuuuagagugucaaguccaaacagcaguagauuucgguaacucauacauagcagaaauggaaacugaaaguuggauaguagauagacaaugggcacaagacuugacacuaccuuggcaaucaggaagcggaggaguauggagagaaaugcaucauuuaguagaauuugaaccaccucaugcagcaacaauaagaguauuagcccuaggaaaccaagaaggaaguuuaaaaacagcacuaacaggagcuaugagaguaacaaaagauacaaaugacaacaaucuauacaaauuacacggaggacauguaagcugccggguaaaguugagcgcacuaacauuaaaaggaacgaguuauaaaauaugcacagauaaaauguucuuuguuaaaaauccuacagauaccggucauggaacaguaguaaugcaaguaaaaguaaguaaaggcgcucccuguagaauaccuguaauagucgcagacgauuuaaccgcagcaauaaauaaaggaauauuagucacgguaaacccaauagcgucaacaaaugaugaugaaguauuaauagaaguuaacccaccuuuuggagacaguuauauaauagucggaaggggugauaguagacuaacauaccaauggcauaaagaaggaagcucaauaggaaaauuauuuacucaaaccaugaaagguguagaaaggcuagcuguuaugggugacacagcaugggauuuuucaagcgcaggaggguucuuuacaucaguagguaaaggaauacauacaguauuuggaagugcauuucaaggauuauuuggugguuuaaauuggauaacaaaaguaauaaugggcgcaguuuuaauauggguagguauaaacacaagaaauaugacaaugucuaugaguaugauauuggucggaguaauaaugauguuuuuaucacuaggagugggugcagaucaagguugcgcuauuaauuuuggaaaaugaggacuagucccuguucccagagcccacuuuuuuuucuuuuuuugaaauaaaauagccugucuuucagaucuaaaaaaaaaaaaaaaaaaaaaaaaaaaaaaaaaaaaaaaaaaaaaaaaaaaaaaaaaaaaaaaaugcaucccccccccccccccccccccccccccccccaaaggcucuuuucagagccaccagaauu

SEQ ID NO: 1301 - RNA, 2368 nt, Artificial Sequence
  mRNA product Design a-4 comprising derived and/or modified sequence from YFV__NC_002031.1__SSjev-prME (polyprotein: aa122-778) (opt6)
gggagacuccugucgggcggaaguaggaggaguagaguuuaaaaacaguacucuuuuuccgguucgggacguaguugaagcaacgacaagccggauaaccgcucuugagacaggaagcuuaccaugggaaaaagaagugcaggaaguauaaugugguuggcaaguuuagcaguaguaauagcaugugcaggagcaguaacauuagucagaaagaacagaugguuauuacugaacguaacaagugaagacuuaggaaaaacauuuaguguaggcacaggaaauugcacaacaaauauacuugaagcaaaauauugguguccagauagcauggaauauaauuguccaaauuuaucaccuagagaggaacccgaugauauagauuguugguguuauggaguugaaaacgugcgaguagcauaugguaaaugugauagcgcaggaagaaguagaagaaguagaagggcaauagacuuaccaacucaugaaaaccauggauuaaaaacaagacaggaaaaauggaugacaggaagaaugggagaacgacaauuacagaaaauagaaagaugguucguaagaaauccauucuuugcaguaacagcauuaacaauagcauaucuaguuggaaguaacaugacucaaagaguaguaauagcauuguuaguacuagcaguaggaccggcuuauagcgcacauuguauagggauaacagauagagacuuuauagaaggagugcacgguggaacauggguuucagcaacgcuagagcaagauaaauguguaacgguaauggcgccggauaaaccaagccuugacauaucacuagaaacgguugcaaucgaucgaccagccgaaguaagaaaaguaugcuauaaugcggucuuaacacacguaaaaauaaaugauaaauguccuucaacgggagaagcacauuuagcagaagaaaacgaaggagacaacgcguguaaaagaacauauucagauaggggcuggggaaacggcugcgguuuauuuggaaaaggaaguauaguagcaugcgcaaaauuuacuugcgcaaaaaguaugaguuuauucgaaguugaucaaacaaagauacaauauguaauacgagcacaauuacauguaggugcaaagcaagaaaauuggaauacagacauaaaaacauugaaauuugacgcuuugaguggaucacaagaaguagaauuuauaggauacggaaaagcuacauuagaaugucaaguacaaacugcaguagauuuuggaaauucguauauagcagaaauggaaacugaaucauggauuguagauaggcaaugggcacaagauuuaaccuugccauggcaaagcggaagcggggguguauggcgggaaaugcaucauuuaguagaguucgaacccccacacgcggcuaccauaagaguacuagcauuaggaaaucaagaagggagucucaagacagcacucacaggugcaaugcgaguaacgaaagauacaaaugacaauaaucuauacaaacuacacggaggacauguaucuugcagaguaaaauuaucugcauuaacacuaaaagggacaaguuacaaaauuuguacagauaagauguucuuugucaaaaacccaacagacacgggacacggaacgguagucaugcaaguuaaaguaagcaaaggagcgccaugcagaauaccaguaaucgucgcagaugauuuaacagccgcaauaaauaaagguauauuaguaacgguaaauccaauagcgaguaccaaugaugaugaaguacuaauagaagugaacccaccauuuggugauagcuauauaauaguagggcgaggagauucaagauuaacauaucaauggcauaaagaagguaguaguauaggaaaauuauuuacacaaacuaugaaaggcguagaaagacuagcagucaugggagauacagcaugggauuucucaagugcaggcggauuuuucacaagcgucggaaaaggaauacauacaguguuugguagugcguuucaaggauuauucggaggacuaaauuggauaacgaaaguaauuaugggagcaguucucauaugggucggaauaaauacaaggaacaugacuaugaguaugagcaugauccuaguaggaguaauaaugauguuucuaagccuaggcguuggugcaugaggacuagucccuguucccagagcccacuuuuuuuucuuuuuuugaaauaaaauagccugucuuucagaucuaaaaaaaaaaaaaaaaaaaaaaaaaaaaaaaaaaaaaaaaaaaaaaaaaaaaaaaaaaaaaaaaugcaucccccccccccccccccccccccccccccccaaaggcucuuuucagagccaccagaauu

SEQ ID NO: 1302 - RNA, 2416 nt, Artificial Sequence
  mRNA product Design a-4 comprising derived and/or modified sequence from YFV__NC_002031.1__X-SS-prME-XX (polyprotein: aa92-788) (opt11)
gggagacuccugucgggcggaaguaggaggaguagaguuuaaaaacaguacucuuuuuccgguucgggacguaguugaagcaacgacaagccggauaaccgcucuugagacaggaagcuuaccaugcggggacuaagcagcagaaaaagacgcagccacgaugugcucaccgugcaauuccucauacuggggaugcuccuaaugaccggaggcgugacccuaguaaggaaaaacagauggcuacuacuaaacguaaccucagaagaucuaggaaagacauuuucagucggcacaggcaacugcacaaccaacauacuagaagcaaaauauuggugcccagacagcauggaauacaacugucccaaccucagcccaagagaggaaccagacgacauagacugcugguguuacggaguagaaaacguaagaguggcauacggcaaaugcgacagcgcaggcaggagccgaagaucccgcagagccaucgacuugcccacgcacgaaaaccacggccucaaaacacgacaagaaaaauggaugacagggcgaaugggagaacgacagcuccagaaaauagaacgaugguucguccggaacccguucuucgcaguaacggcacuaacaaucgcauaccucguaggcagcaacaugacacaaagaguggucaucgcgcuacucguacuagcaguggggcccgcauacagugcacacugcauaggaaucacagaccgugacuucaucgaaggcguacacggaggaacguggguaagcgcgacacuggaacaagacaaaugcgugacaguaauggcaccagacaaaccaagccuagacauaucccuagaaacggucgccaucgaccgucccgcagaaguacgaaagguaugcuauaaugcaguccucacacacgucaaaauaaacgacaaaugccccagcacgggcgaagcacaccucgccgaagaaaacgaaggggauaacgcgugcaaacgcaccuacuccgacaggggauggggcaacggaugcggacuguucggaaaaggauccauagucgcaugcgcaaaauuuaccugcgcaaaaagcaugagcuuguucgagguagaccaaacgaagauccaauacguaauccgagcucaacuacacguuggggccaagcaagagaacuggaauacggacaucaaaacacuaaaauucgacgcacucuccggcucacaagaagucgaguucaucggcuacggcaaagcaacacuagaaugccaaguacaaacagcgguggacuucggcaacagcuacauagcagaaauggaaacagaaagcuggauaguagaccgacaaugggcacaagaccuaacucugccauggcaaagcggcucaggaggaguguggagagagaugcaccaccugguagaguucgaacccccacacgcagcaacaauaaggguacuggcacuaggcaaccaagaaggcagccuaaaaaccgcacucacaggagccaugcgcgugacgaaggacaccaacgacaacaaccucuacaaacuccacggagggcacguauccugccgcguaaaacuaucagcacuaacgcuaaaaggaacaagcuacaaaauaugcacagacaaaauguucuucgucaaaaaccccacagacacaggccacggcacagucguaaugcaagugaaggucagcaagggggcccccugccgaaucccagucauaguggcagacgaccucacggccgccaucaacaaagggauccugguaacagugaacccaauagcaucgaccaacgacgacgaaguccucauagaagugaaucccccguucggcgacagcuacaucaucguaggacgcggcgacucccgacugacguaccaauggcauaaagaaggcagcagcauuggaaaacuauucacccaaaccaugaagggcgucgaaagacucgcggugaugggagacaccgcaugggacuucucgagcgcaggcggcuucuucacaagcguaggaaaagggauucacacaguauucggauccgcauuccaaggccucuucgggggacuaaacuggauaacgaaaguaauaaugggagcaguucucauauggguaggaaucaacacacgaaacaugacaauguccaugucaaugauacucguaggcguaaucaugauguuucugucacucggagugggagcagaccaagguugcgccauaaacuucggcaagugaggacuagucccuguucccagagcccacuuuuuuuucuuuuuuugaaauaaaauagccugucuuucagaucuaaaaaaaaaaaaaaaaaaaaaaaaaaaaaaaaaaaaaaaaaaaaaaaaaaaaaaaaaaaaaaaaugcaucccccccccccccccccccccccccccccccaaaggcucuuuucagagccaccagaauu

SEQ ID NO: 1303 - RNA, 2353 nt, Artificial Sequence
  mRNA product Design a-4 comprising derived and/or modified sequence from YFV__NC_002031.1__SS-prME (polyprotein: M,aa104-778) (opt11)
gggagacuccugucgggcggaaguaggaggaguagaguuuaaaaacaguacucuuuuuccgguucgggacguaguugaagcaacgacaagccggauaaccgcucuugagacaggaagcuuaccauggacguccuuacgguacaauuccuaauacuaggaaugcuucucaugaccgggggcgucacccuaguccggaaaaacagauggcuacugcuaaauguuacaagcgaagaccuuggcaagacauucagcguaggcacgggcaacuguacaaccaacauacuagaagcgaaauacuggugcccagacuccauggaguacaacugccccaaccuaagcccacgggaagaacccgacgacauagacugcugguguuacggggucgaaaacguccgcgucgcauacgggaaaugcgauagcgcaggccgcaguagacgcucccgccgcgccauagaccuaccaacgcacgagaaccacggccucaaaacucgccaagaaaaauggaugacagggcgaaugggugaacgccaacuacagaagaucgaaaggugguucgucaggaacccauucuucgcagugaccgcacuaacgauagccuaccuagugggaucaaacaugacgcaacgagucgugaucgcacuccuaguacuggccguaggaccggccuacuccgcgcacugcaucggcauaacggauagggacuucauugaaggaguacauggcggcacgugggucagcgcgacacucgaacaagacaaaugcguaaccgugauggcacccgacaaaccgagucuugacauaagccuggaaacgguagcgauagaucguccagccgaaguaagaaaaguaugcuacaacgcaguccuaacacacguaaaaauaaacgacaaaugcccaagcacaggggaagcccaccucgcagaagagaacgaaggcgacaacgcaugcaaacgcacauacuccgacaggggaugggggaauggcugcggacuauucgggaaaggaagcaucgucgcgugcgccaaauucacaugcgccaagagcaugagccuguucgaagucgaccaaacaaaaauccaauacguaauacgcgcgcaacugcacguaggagcgaaacaggaaaacuggaacacggacauuaaaacccucaaauucgacgcgcucucaggaucacaagaagucgaguucaucggcuacggcaaggcaacgcucgaaugccaaguacaaacagcaguagacuucggaaacagcuacauugccgagauggaaaccgagagcuggauagucgacagacaaugggcccaagaccuaacccugccauggcaaucaggcuccgggggcgucuggcgagagaugcaccaccuaguagaguucgaaccaccccacgccgccacgaucagaguacuggcccugggcaaccaagaaggcucacucaagacggcgcucacaggagcaaugagggucacgaaagacaccaacgacaacaaccucuacaaacuacacggagggcacgugagcugccggguaaaacugagcgcacucacucugaagggaacaagcuacaagauaugcaccgacaaaauguucuucgugaaaaacccaaccgacacuggacacggcacggucguuaugcaagucaagguaucaaaaggagccccaugcagaaucccaguaauaguagcggacgaccuaacagccgccauaaacaaaggaauccuagucacgguaaauccgauagcaucgaccaacgacgacgaaguacuaauagaagugaacccaccauucggcgacagcuacauaauagucgggagaggcgacucgcgacuaaccuaccaauggcacaaggaagggagcucuaucgggaaacuauucacccaaacgaugaagggcguagaaaggcucgcagucaugggcgacaccgcaugggacuucuccagcgcgggaggcuucuuuacuucagugggaaaagggauacacaccgucuucggcagcgcauuccagggccuauucggcggguuaaacuggaucacgaaagugauaaugggggcaguucucaucugggucggaauaaacacacguaacaugaccaugagcaugagcaugauccuagucggggucauaaugauguucuugagcuugggaguaggugcaugaggacuagucccuguucccagagcccacuuuuuuuucuuuuuuugaaauaaaauagccugucuuucagaucuaaaaaaaaaaaaaaaaaaaaaaaaaaaaaaaaaaaaaaaaaaaaaaaaaaaaaaaaaaaaaaaaugcaucccccccccccccccccccccccccccccccaaaggcucuuuucagagccaccagaauu

SEQ ID NO: 1304 - RNA, 2380 nt, Artificial Sequence
  mRNA product Design a-4 comprising derived and/or modified sequence from YFV__NC_002031.1__SSIgE-prME-XX (polyprotein: aa122-788) (opt11)
gggagacuccugucgggcggaaguaggaggaguagaguuuaaaaacaguacucuuuuuccgguucgggacguaguugaagcaacgacaagccggauaaccgcucuugagacaggaagcuuaccauggauuggacguggauacucuuucucguggccgcggccacgcgcgugcacucggugacccuaguaaggaaaaacagauggcuacuacuaaacguaaccucagaagaucuaggaaagacauuuucagucggcacaggcaacugcacaaccaacauacuagaagcaaaauauuggugcccagacagcauggaauacaacugucccaaccucagcccaagagaggaaccagacgacauagacugcugguguuacggaguagaaaacguaagaguggcauacggcaaaugcgacagcgcaggcaggagccgaagaucccgcagagccaucgacuugcccacgcacgaaaaccacggccucaaaacacgacaagaaaaauggaugacagggcgaaugggagaacgacagcuccagaaaauagaacgaugguucguccggaacccguucuucgcaguaacggcacuaacaaucgcauaccucguaggcagcaacaugacacaaagaguggucaucgcgcuacucguacuagcaguggggcccgcauacagugcacacugcauaggaaucacagaccgugacuucaucgaaggcguacacggaggaacguggguaagcgcgacacuggaacaagacaaaugcgugacaguaauggcaccagacaaaccaagccuagacauaucccuagaaacggucgccaucgaccgucccgcagaaguacgaaagguaugcuauaaugcaguccucacacacgucaaaauaaacgacaaaugccccagcacgggcgaagcacaccucgccgaagaaaacgaaggggauaacgcgugcaaacgcaccuacuccgacaggggauggggcaacggaugcggacuguucggaaaaggauccauagucgcaugcgcaaaauuuaccugcgcaaaaagcaugagcuuguucgagguagaccaaacgaagauccaauacguaauccgagcucaacuacacguuggggccaagcaagagaacuggaauacggacaucaaaacacuaaaauucgacgcacucuccggcucacaagaagucgaguucaucggcuacggcaaagcaacacuagaaugccaaguacaaacagcgguggacuucggcaacagcuacauagcagaaauggaaacagaaagcuggauaguagaccgacaaugggcacaagaccuaacucugccauggcaaagcggcucaggaggaguguggagagagaugcaccaccugguagaguucgaacccccacacgcagcaacaauaaggguacuggcacuaggcaaccaagaaggcagccuaaaaaccgcacucacaggagccaugcgcgugacgaaggacaccaacgacaacaaccucuacaaacuccacggagggcacguauccugccgcguaaaacuaucagcacuaacgcuaaaaggaacaagcuacaaaauaugcacagacaaaauguucuucgucaaaaaccccacagacacaggccacggcacagucguaaugcaagugaaggucagcaagggggcccccugccgaaucccagucauaguggcagacgaccucacggccgccaucaacaaagggauccugguaacagugaacccaauagcaucgaccaacgacgacgaaguccucauagaagugaaucccccguucggcgacagcuacaucaucguaggacgcggcgacucccgacugacguaccaauggcauaaagaaggcagcagcauuggaaaacuauucacccaaaccaugaagggcgucgaaagacucgcggugaugggagacaccgcaugggacuucucgagcgcaggcggcuucuucacaagcguaggaaaagggauucacacaguauucggauccgcauuccaaggccucuucgggggacuaaacuggauaacgaaaguaauaaugggagcaguucucauauggguaggaaucaacacacgaaacaugacaauguccaugucaaugauacucguaggcguaaucaugauguuucugucacucggagugggagcagaccaagguugcgccauaaacuucggcaagugaggacuagucccuguucccagagcccacuuuuuuuucuuuuuuugaaauaaaauagccugucuuucagaucuaaaaaaaaaaaaaaaaaaaaaaaaaaaaaaaaaaaaaaaaaaaaaaaaaaaaaaaaaaaaaaaaugcaucccccccccccccccccccccccccccccccaaaggcucuuuucagagccaccagaauu

SEQ ID NO: 1305 - RNA, 2350 nt, Artificial Sequence
  mRNA product Design a-4 comprising derived and/or modified sequence from YFV__NC_002031.1__SSIgE-prME (polyprotein: aa122-778) (opt11)
gggagacuccugucgggcggaaguaggaggaguagaguuuaaaaacaguacucuuuuuccgguucgggacguaguugaagcaacgacaagccggauaaccgcucuugagacaggaagcuuaccauggauuggacguggauacucuuucucguggccgcggccacgcgcgugcacucggugacccuaguccgcaaaaacagauggcuacuacuaaacguaacaagcgaagaccugggcaaaacauucagcguuggcacaggcaauugcacgacaaacauacucgaagcaaaauacuggugccccgacagcauggaauacaacugcccaaaucuaagcccacgcgaagaaccagacgacaucgacuguuggugcuacggagucgaaaacgugagggucgcauacgguaaaugcgacagcgcuggcagaagcagacgcucccgacgagccauugaccucccuacccacgaaaaccacggccuaaaaacccggcaggaaaaauggaugacaggccggaugggagaacgccaacuacagaaaauagagaggugguuuguaagaaacccauucuucgccguaaccgcgcucaccaucgcuuaccucguaggaucaaacaugacgcaaagaguagugaucgcgcuacucguacuagcgguaggccccgccuacagcgcacacugcaucggcaucacugacagggacuucauagaaggcguccacgggggcacguggguuagcgccacacucgaacaagacaaaugcgucacagugauggcaccagacaaacccucacuagacaucucacuagaaaccgucgcaaucgaccgcccagcagaagucaggaaagugugcuacaacgccgucuuaacccacguaaaaauaaaugauaaaugcccaagcacgggagaggcacaccuagcggaagaaaacgaaggcgacaacgcgugcaaacguaccuacagcgacagaggguggggcaacggaugcggcuuauucggaaaaggaaguaucguagcaugcgcaaaauuuaccugcgccaaaagcaugucccuauucgaaguagaucaaacaaaaauacaauacgucauccgagcccaacuacacgugggggcaaaacaagaaaacuggaacaccgacaucaaaacacucaaauucgaugcccuaagcggcucccaagaaguagaguucaucgguuacggcaaggccacgcucgagugccaaguccaaacagcaguagacuucgggaacucauacaucgccgagauggaaacggaaucauggauugucgacagacaaugggcacaagaccuaacacuaccauggcaaucaggcagcggaggggucuggcgagaaaugcaccaccuaguagaguucgaacccccacacgccgcaacaauccgaguacuagcccucggaaaccaagaaggaucacuaaaaaccgcacucaccggcgcaaugcgcguaacaaaagauacaaacgacaacaaccuauacaaacuacacggcggacacgucagcugccgcgucaaacuauccgcccuaacacuaaaaggaacaagcuacaaaauaugcacagacaaaauguucuucgucaaaaauccgacugacacgggccacggcacagucguaaugcaaguaaaagucucaaaaggcgcaccaugcagaaucccaguaaucgucgccgaugaccuaacagccgcaaucaacaagggcauccucguaacaguaaaccccauagccagcaccaacgacgacgaaguccuaaucgaagucaacccacccuucggagacagcuacauaauaguaggacgaggggacucacgccuaaccuaccaauggcacaaagaaggauccucaaucggcaaacuguucacacaaacgaugaaaggcguagaaagacucgcaguaaugggcgauacggccugggacuucucaagcgcgggcggcuucuucacgagcgucggaaaaggcauccauacaguauucggaagcgcauuccaaggccuauuuggaggccucaacuggauaacaaaagugaucaugggagcaguacugaucugggucggcaucaacacccgcaacaugacgaugagcaugucaaugauccucgugggaguaauaaugauguuccucagccugggcguaggcgcaugaggacuagucccuguucccagagcccacuuuuuuuucuuuuuuugaaauaaaauagccugucuuucagaucuaaaaaaaaaaaaaaaaaaaaaaaaaaaaaaaaaaaaaaaaaaaaaaaaaaaaaaaaaaaaaaaaugcaucccccccccccccccccccccccccccccccaaaggcucuuuucagagccaccagaauu

SEQ ID NO: 1306 - RNA, 2398 nt, Artificial Sequence
  mRNA product Design a-4 comprising derived and/or modified sequence from YFV__NC_002031.1__SSjev-prME-XX (polyprotein: aa122-788) (opt11)
gggagacuccugucgggcggaaguaggaggaguagaguuuaaaaacaguacucuuuuuccgguucgggacguaguugaagcaacgacaagccggauaaccgcucuugagacaggaagcuuaccauggggaaaaggagcgcgggcucgauaaugugguuggccucgcucgcggucgugaucgcgugcgcgggcgcggugacccuaguaaggaaaaacagauggcuacuacuaaacguaaccucagaagaucuaggaaagacauuuucagucggcacaggcaacugcacaaccaacauacuagaagcaaaauauuggugcccagacagcauggaauacaacugucccaaccucagcccaagagaggaaccagacgacauagacugcugguguuacggaguagaaaacguaagaguggcauacggcaaaugcgacagcgcaggcaggagccgaagaucccgcagagccaucgacuugcccacgcacgaaaaccacggccucaaaacacgacaagaaaaauggaugacagggcgaaugggagaacgacagcuccagaaaauagaacgaugguucguccggaacccguucuucgcaguaacggcacuaacaaucgcauaccucguaggcagcaacaugacacaaagaguggucaucgcgcuacucguacuagcaguggggcccgcauacagugcacacugcauaggaaucacagaccgugacuucaucgaaggcguacacggaggaacguggguaagcgcgacacuggaacaagacaaaugcgugacaguaauggcaccagacaaaccaagccuagacauaucccuagaaacggucgccaucgaccgucccgcagaaguacgaaagguaugcuauaaugcaguccucacacacgucaaaauaaacgacaaaugccccagcacgggcgaagcacaccucgccgaagaaaacgaaggggauaacgcgugcaaacgcaccuacuccgacaggggauggggcaacggaugcggacuguucggaaaaggauccauagucgcaugcgcaaaauuuaccugcgcaaaaagcaugagcuuguucgagguagaccaaacgaagauccaauacguaauccgagcucaacuacacguuggggccaagcaagagaacuggaauacggacaucaaaacacuaaaauucgacgcacucuccggcucacaagaagucgaguucaucggcuacggcaaagcaacacuagaaugccaaguacaaacagcgguggacuucggcaacagcuacauagcagaaauggaaacagaaagcuggauaguagaccgacaaugggcacaagaccuaacucugccauggcaaagcggcucaggaggaguguggagagagaugcaccaccugguagaguucgaacccccacacgcagcaacaauaaggguacuggcacuaggcaaccaagaaggcagccuaaaaaccgcacucacaggagccaugcgcgugacgaaggacaccaacgacaacaaccucuacaaacuccacggagggcacguauccugccgcguaaaacuaucagcacuaacgcuaaaaggaacaagcuacaaaauaugcacagacaaaauguucuucgucaaaaaccccacagacacaggccacggcacagucguaaugcaagugaaggucagcaagggggcccccugccgaaucccagucauaguggcagacgaccucacggccgccaucaacaaagggauccugguaacagugaacccaauagcaucgaccaacgacgacgaaguccucauagaagugaaucccccguucggcgacagcuacaucaucguaggacgcggcgacucccgacugacguaccaauggcauaaagaaggcagcagcauuggaaaacuauucacccaaaccaugaagggcgucgaaagacucgcggugaugggagacaccgcaugggacuucucgagcgcaggcggcuucuucacaagcguaggaaaagggauucacacaguauucggauccgcauuccaaggccucuucgggggacuaaacuggauaacgaaaguaauaaugggagcaguucucauauggguaggaaucaacacacgaaacaugacaauguccaugucaaugauacucguaggcguaaucaugauguuucugucacucggagugggagcagaccaagguugcgccauaaacuucggcaagugaggacuagucccuguucccagagcccacuuuuuuuucuuuuuuugaaauaaaauagccugucuuucagaucuaaaaaaaaaaaaaaaaaaaaaaaaaaaaaaaaaaaaaaaaaaaaaaaaaaaaaaaaaaaaaaaaugcaucccccccccccccccccccccccccccccccaaaggcucuuuucagagccaccagaauu

SEQ ID NO: 1307 - RNA, 2368 nt, Artificial Sequence
  mRNA product Design a-4 comprising derived and/or modified sequence from YFV__NC_002031.1__SSjev-prME (polyprotein: aa122-778) (opt11)
gggagacuccugucgggcggaaguaggaggaguagaguuuaaaaacaguacucuuuuuccgguucgggacguaguugaagcaacgacaagccggauaaccgcucuugagacaggaagcuuaccauggggaaaaggagcgcgggcucgauaaugugguuggccucgcucgcggucgugaucgcgugcgcgggcgcggugacccuaguccgcaaaaacagauggcuacuacuaaacguaacaagcgaagaccugggcaaaacauucagcguuggcacaggcaauugcacgacaaacauacucgaagcaaaauacuggugccccgacagcauggaauacaacugcccaaaucuaagcccacgcgaagaaccagacgacaucgacuguuggugcuacggagucgaaaacgugagggucgcauacgguaaaugcgacagcgcuggcagaagcagacgcucccgacgagccauugaccucccuacccacgaaaaccacggccuaaaaacccggcaggaaaaauggaugacaggccggaugggagaacgccaacuacagaaaauagagaggugguuuguaagaaacccauucuucgccguaaccgcgcucaccaucgcuuaccucguaggaucaaacaugacgcaaagaguagugaucgcgcuacucguacuagcgguaggccccgccuacagcgcacacugcaucggcaucacugacagggacuucauagaaggcguccacgggggcacguggguuagcgccacacucgaacaagacaaaugcgucacagugauggcaccagacaaacccucacuagacaucucacuagaaaccgucgcaaucgaccgcccagcagaagucaggaaagugugcuacaacgccgucuuaacccacguaaaaauaaaugauaaaugcccaagcacgggagaggcacaccuagcggaagaaaacgaaggcgacaacgcgugcaaacguaccuacagcgacagaggguggggcaacggaugcggcuuauucggaaaaggaaguaucguagcaugcgcaaaauuuaccugcgccaaaagcaugucccuauucgaaguagaucaaacaaaaauacaauacgucauccgagcccaacuacacgugggggcaaaacaagaaaacuggaacaccgacaucaaaacacucaaauucgaugcccuaagcggcucccaagaaguagaguucaucgguuacggcaaggccacgcucgagugccaaguccaaacagcaguagacuucgggaacucauacaucgccgagauggaaacggaaucauggauugucgacagacaaugggcacaagaccuaacacuaccauggcaaucaggcagcggaggggucuggcgagaaaugcaccaccuaguagaguucgaacccccacacgccgcaacaauccgaguacuagcccucggaaaccaagaaggaucacuaaaaaccgcacucaccggcgcaaugcgcguaacaaaagauacaaacgacaacaaccuauacaaacuacacggcggacacgucagcugccgcgucaaacuauccgcccuaacacuaaaaggaacaagcuacaaaauaugcacagacaaaauguucuucgucaaaaauccgacugacacgggccacggcacagucguaaugcaaguaaaagucucaaaaggcgcaccaugcagaaucccaguaaucgucgccgaugaccuaacagccgcaaucaacaagggcauccucguaacaguaaaccccauagccagcaccaacgacgacgaaguccuaaucgaagucaacccacccuucggagacagcuacauaauaguaggacgaggggacucacgccuaaccuaccaauggcacaaagaaggauccucaaucggcaaacuguucacacaaacgaugaaaggcguagaaagacucgcaguaaugggcgauacggccugggacuucucaagcgcgggcggcuucuucacgagcgucggaaaaggcauccauacaguauucggaagcgcauuccaaggccuauuuggaggccucaacuggauaacaaaagugaucaugggagcaguacugaucugggucggcaucaacacccgcaacaugacgaugagcaugucaaugauccucgugggaguaauaaugauguuccucagccugggcguaggcgcaugaggacuagucccuguucccagagcccacuuuuuuuucuuuuuuugaaauaaaauagccugucuuucagaucuaaaaaaaaaaaaaaaaaaaaaaaaaaaaaaaaaaaaaaaaaaaaaaaaaaaaaaaaaaaaaaaaugcaucccccccccccccccccccccccccccccccaaaggcucuuuucagagccaccagaauu

SEQ ID NO: 1308 - RNA, 2311 nt, Artificial Sequence
  mRNA product Design a-1 (A64-N5) comprising derived and/or modified sequence from YFV__NC_002031.1__X-SS-prME-XX (polyprotein: aa92-788) (opt1) R5351
gggagagucccgcagucggcguccagcggcucugcuuguucgugugugugucguugcaggccuuauucaagcuuaccaugcggggccugagcucccgcaagcggcgcagccacgacgugcucaccguccaguuccugauccuggggaugcuccugaugaccggcggggugacgcuggugcggaagaaccgcuggcuccugcugaacgucaccuccgaggaccucggcaagaccuucagcguggggaccggcaacugcacgaccaacauccuggaggccaaguacuggugccccgacuccauggaguacaacugcccgaaccugagcccccgggaggagcccgacgacaucgacugcuggugcuacggcguggagaacguccgcguggccuacgggaagugcgacuccgcgggccggagccgccggucccgccgggccaucgaccuccccacccacgagaaccacgggcugaagacccgccaggagaaguggaugacgggccggaugggggagcgccagcugcagaagaucgagcggugguucgugcgcaacccguucuucgccgucaccgcccucaccaucgccuaccuggugggcagcaacaugacccagcggguggucaucgcgcugcucgugcuggccgugggccccgccuacuccgcccacugcaucgggaucacggaccgcgacuucaucgagggcguccacgggggcaccugggugagcgcgacccuggagcaggacaagugcgugaccgucauggcccccgacaagcccucccucgacaucagccuggagacgguggccaucgaccggccggccgaggugcgcaaggucugcuacaacgccgugcugacccacgugaagaucaacgacaagugccccuccaccggcgaggcgcaccucgccgaggagaacgagggggacaacgccugcaagcggaccuacagcgaccggggcugggggaacggcugcgggcuguucggcaagggcuccaucgucgccugcgccaaguucacgugcgcgaaguccaugagccuguucgagguggaccagaccaagauccaguacgucauccgcgcccagcuccacgugggggccaagcaggagaacuggaacaccgacaucaagacccugaaguucgacgcccugagcggcagccaggagguggaguucaucggguacggcaaggccacgcucgagugccagguccagaccgcgguggacuucgggaacuccuacaucgccgagauggagaccgagagcuggaucguggaccggcagugggcccaggaccugacccugcccuggcaguccggcagcggcggggucuggcgcgagaugcaccaccucguggaguucgagcccccgcacgccgccacgauccgggugcuggcgcugggcaaccaggaggggucccucaagaccgcccugaccggcgccaugcgcgucaccaaggacacgaacgacaacaaccuguacaagcuccacgggggccacgugagcugccgggugaagcuguccgcccugacccucaagggcaccagcuacaagaucugcaccgacaagauguucuucgucaagaaccccacggacaccgggcacggcaccguggugaugcaggucaagguguccaagggggcgcccugccgcaucccggugaucgucgccgacgaccugaccgccgccaucaacaagggcauccuggugaccgugaacccgaucgccagcacgaacgacgacgagguccucaucgaggugaacccccccuucggcgacuccuacaucaucguggggcggggcgacagccgccugaccuaccaguggcacaaggagggguccagcaucggcaagcuguucacccagaccaugaagggggucgagcggcuggcggugaugggcgacacggccugggacuucuccagcgccggcggguucuucaccuccgugggcaaggggauccacaccgucuucggcagcgccuuccaggggcuguucggcggccucaacuggaucaccaaggugaucaugggggccgugcugaucugggucggcaucaacacgcgcaacaugaccauguccaugagcaugauccucgugggggugaucaugauguuccugagccugggcgucggggcggaccagggcugcgccaucaacuucggcaagugaggacuagucccuguucccagagcccacuuuuuuuucuuuuuuugaaauaaaauagccugucuuucagaucuaaaaaaaaaaaaaaaaaaaaaaaaaaaaaaaaaaaaaaaaaaaaaaaaaaaaaaaaaaaaaaaagaauu

SEQ ID NO: 1309 - RNA, 2330 nt, Artificial Sequence
  mRNA product Design a-2 (A64-N5) comprising derived and/or modified sequence from YFV__NC_002031.1__X-SS-prME-XX (polyprotein: aa92-788) (opt1) R5369
gggagaguccgcucagccagguugcagaagcggcuuagcguguguccuaaucuucucucugcguguagguaggccugugccgcaaacaagcuuaccaugcggggccugagcucccgcaagcggcgcagccacgacgugcucaccguccaguuccugauccuggggaugcuccugaugaccggcggggugacgcuggugcggaagaaccgcuggcuccugcugaacgucaccuccgaggaccucggcaagaccuucagcguggggaccggcaacugcacgaccaacauccuggaggccaaguacuggugccccgacuccauggaguacaacugcccgaaccugagcccccgggaggagcccgacgacaucgacugcuggugcuacggcguggagaacguccgcguggccuacgggaagugcgacuccgcgggccggagccgccggucccgccgggccaucgaccuccccacccacgagaaccacgggcugaagacccgccaggagaaguggaugacgggccggaugggggagcgccagcugcagaagaucgagcggugguucgugcgcaacccguucuucgccgucaccgcccucaccaucgccuaccuggugggcagcaacaugacccagcggguggucaucgcgcugcucgugcuggccgugggccccgccuacuccgcccacugcaucgggaucacggaccgcgacuucaucgagggcguccacgggggcaccugggugagcgcgacccuggagcaggacaagugcgugaccgucauggcccccgacaagcccucccucgacaucagccuggagacgguggccaucgaccggccggccgaggugcgcaaggucugcuacaacgccgugcugacccacgugaagaucaacgacaagugccccuccaccggcgaggcgcaccucgccgaggagaacgagggggacaacgccugcaagcggaccuacagcgaccggggcugggggaacggcugcgggcuguucggcaagggcuccaucgucgccugcgccaaguucacgugcgcgaaguccaugagccuguucgagguggaccagaccaagauccaguacgucauccgcgcccagcuccacgugggggccaagcaggagaacuggaacaccgacaucaagacccugaaguucgacgcccugagcggcagccaggagguggaguucaucggguacggcaaggccacgcucgagugccagguccagaccgcgguggacuucgggaacuccuacaucgccgagauggagaccgagagcuggaucguggaccggcagugggcccaggaccugacccugcccuggcaguccggcagcggcggggucuggcgcgagaugcaccaccucguggaguucgagcccccgcacgccgccacgauccgggugcuggcgcugggcaaccaggaggggucccucaagaccgcccugaccggcgccaugcgcgucaccaaggacacgaacgacaacaaccuguacaagcuccacgggggccacgugagcugccgggugaagcuguccgcccugacccucaagggcaccagcuacaagaucugcaccgacaagauguucuucgucaagaaccccacggacaccgggcacggcaccguggugaugcaggucaagguguccaagggggcgcccugccgcaucccggugaucgucgccgacgaccugaccgccgccaucaacaagggcauccuggugaccgugaacccgaucgccagcacgaacgacgacgagguccucaucgaggugaacccccccuucggcgacuccuacaucaucguggggcggggcgacagccgccugaccuaccaguggcacaaggagggguccagcaucggcaagcuguucacccagaccaugaagggggucgagcggcuggcggugaugggcgacacggccugggacuucuccagcgccggcggguucuucaccuccgugggcaaggggauccacaccgucuucggcagcgccuuccaggggcuguucggcggccucaacuggaucaccaaggugaucaugggggccgugcugaucugggucggcaucaacacgcgcaacaugaccauguccaugagcaugauccucgugggggugaucaugauguuccugagccugggcgucggggcggaccagggcugcgccaucaacuucggcaagugaggacuagucccuguucccagagcccacuuuuuuuucuuuuuuugaaauaaaauagccugucuuucagaucuaaaaaaaaaaaaaaaaaaaaaaaaaaaaaaaaaaaaaaaaaaaaaaaaaaaaaaaaaaaaaaaagaauu

SEQ ID NO: 1310 - RNA, 2375 nt, Artificial Sequence
  mRNA product Design b-4 (A64-N5)comprising derived and/or modified sequence from YFV__NC_002031.1__X-SS-prME-XX (polyprotein: aa92-788) (opt1) R5353
gggagagucccgcagucggcguccagcggcucugcuuguucgugugugugucguugcaggccuuauucaagcuuaccaugcggggccugagcucccgcaagcggcgcagccacgacgugcucaccguccaguuccugauccuggggaugcuccugaugaccggcggggugacgcuggugcggaagaaccgcuggcuccugcugaacgucaccuccgaggaccucggcaagaccuucagcguggggaccggcaacugcacgaccaacauccuggaggccaaguacuggugccccgacuccauggaguacaacugcccgaaccugagcccccgggaggagcccgacgacaucgacugcuggugcuacggcguggagaacguccgcguggccuacgggaagugcgacuccgcgggccggagccgccggucccgccgggccaucgaccuccccacccacgagaaccacgggcugaagacccgccaggagaaguggaugacgggccggaugggggagcgccagcugcagaagaucgagcggugguucgugcgcaacccguucuucgccgucaccgcccucaccaucgccuaccuggugggcagcaacaugacccagcggguggucaucgcgcugcucgugcuggccgugggccccgccuacuccgcccacugcaucgggaucacggaccgcgacuucaucgagggcguccacgggggcaccugggugagcgcgacccuggagcaggacaagugcgugaccgucauggcccccgacaagcccucccucgacaucagccuggagacgguggccaucgaccggccggccgaggugcgcaaggucugcuacaacgccgugcugacccacgugaagaucaacgacaagugccccuccaccggcgaggcgcaccucgccgaggagaacgagggggacaacgccugcaagcggaccuacagcgaccggggcugggggaacggcugcgggcuguucggcaagggcuccaucgucgccugcgccaaguucacgugcgcgaaguccaugagccuguucgagguggaccagaccaagauccaguacgucauccgcgcccagcuccacgugggggccaagcaggagaacuggaacaccgacaucaagacccugaaguucgacgcccugagcggcagccaggagguggaguucaucggguacggcaaggccacgcucgagugccagguccagaccgcgguggacuucgggaacuccuacaucgccgagauggagaccgagagcuggaucguggaccggcagugggcccaggaccugacccugcccuggcaguccggcagcggcggggucuggcgcgagaugcaccaccucguggaguucgagcccccgcacgccgccacgauccgggugcuggcgcugggcaaccaggaggggucccucaagaccgcccugaccggcgccaugcgcgucaccaaggacacgaacgacaacaaccuguacaagcuccacgggggccacgugagcugccgggugaagcuguccgcccugacccucaagggcaccagcuacaagaucugcaccgacaagauguucuucgucaagaaccccacggacaccgggcacggcaccguggugaugcaggucaagguguccaagggggcgcccugccgcaucccggugaucgucgccgacgaccugaccgccgccaucaacaagggcauccuggugaccgugaacccgaucgccagcacgaacgacgacgagguccucaucgaggugaacccccccuucggcgacuccuacaucaucguggggcggggcgacagccgccugaccuaccaguggcacaaggagggguccagcaucggcaagcuguucacccagaccaugaagggggucgagcggcuggcggugaugggcgacacggccugggacuucuccagcgccggcggguucuucaccuccgugggcaaggggauccacaccgucuucggcagcgccuuccaggggcuguucggcggccucaacuggaucaccaaggugaucaugggggccgugcugaucugggucggcaucaacacgcgcaacaugaccauguccaugagcaugauccucgugggggugaucaugauguuccugagccugggcgucggggcggaccagggcugcgccaucaacuucggcaagugaggacuaguaauaaggaaacuguaugaaugucugugggcaggaagugaagagauccuucuguaaagguuuuuggaauuaugucugcugaauaauaaacuuuuuugaaauaauaaaucugguagaaaaaugagaucuaaaaaaaaaaaaaaaaaaaaaaaaaaaaaaaaaaaaaaaaaaaaaaaaaaaaaaaaaaaaaaaagaauu

SEQ ID NO: 1311 - RNA, 2324 nt, Artificial Sequence
  mRNA product Design c-5 (A64-N5) comprising derived and/or modified sequence from YFV__NC_002031.1__X-SS-prME-XX (polyprotein: aa92-788) (opt1) R5357
gggagagcggcucggccauuuugucccagucaguccggaggcugcggcugcagaaguaccgccugcggaguaacugcaaagaagcuuaccaugcggggccugagcucccgcaagcggcgcagccacgacgugcucaccguccaguuccugauccuggggaugcuccugaugaccggcggggugacgcuggugcggaagaaccgcuggcuccugcugaacgucaccuccgaggaccucggcaagaccuucagcguggggaccggcaacugcacgaccaacauccuggaggccaaguacuggugccccgacuccauggaguacaacugcccgaaccugagcccccgggaggagcccgacgacaucgacugcuggugcuacggcguggagaacguccgcguggccuacgggaagugcgacuccgcgggccggagccgccggucccgccgggccaucgaccuccccacccacgagaaccacgggcugaagacccgccaggagaaguggaugacgggccggaugggggagcgccagcugcagaagaucgagcggugguucgugcgcaacccguucuucgccgucaccgcccucaccaucgccuaccuggugggcagcaacaugacccagcggguggucaucgcgcugcucgugcuggccgugggccccgccuacuccgcccacugcaucgggaucacggaccgcgacuucaucgagggcguccacgggggcaccugggugagcgcgacccuggagcaggacaagugcgugaccgucauggcccccgacaagcccucccucgacaucagccuggagacgguggccaucgaccggccggccgaggugcgcaaggucugcuacaacgccgugcugacccacgugaagaucaacgacaagugccccuccaccggcgaggcgcaccucgccgaggagaacgagggggacaacgccugcaagcggaccuacagcgaccggggcugggggaacggcugcgggcuguucggcaagggcuccaucgucgccugcgccaaguucacgugcgcgaaguccaugagccuguucgagguggaccagaccaagauccaguacgucauccgcgcccagcuccacgugggggccaagcaggagaacuggaacaccgacaucaagacccugaaguucgacgcccugagcggcagccaggagguggaguucaucggguacggcaaggccacgcucgagugccagguccagaccgcgguggacuucgggaacuccuacaucgccgagauggagaccgagagcuggaucguggaccggcagugggcccaggaccugacccugcccuggcaguccggcagcggcggggucuggcgcgagaugcaccaccucguggaguucgagcccccgcacgccgccacgauccgggugcuggcgcugggcaaccaggaggggucccucaagaccgcccugaccggcgccaugcgcgucaccaaggacacgaacgacaacaaccuguacaagcuccacgggggccacgugagcugccgggugaagcuguccgcccugacccucaagggcaccagcuacaagaucugcaccgacaagauguucuucgucaagaaccccacggacaccgggcacggcaccguggugaugcaggucaagguguccaagggggcgcccugccgcaucccggugaucgucgccgacgaccugaccgccgccaucaacaagggcauccuggugaccgugaacccgaucgccagcacgaacgacgacgagguccucaucgaggugaacccccccuucggcgacuccuacaucaucguggggcggggcgacagccgccugaccuaccaguggcacaaggagggguccagcaucggcaagcuguucacccagaccaugaagggggucgagcggcuggcggugaugggcgacacggccugggacuucuccagcgccggcggguucuucaccuccgugggcaaggggauccacaccgucuucggcagcgccuuccaggggcuguucggcggccucaacuggaucaccaaggugaucaugggggccgugcugaucugggucggcaucaacacgcgcaacaugaccauguccaugagcaugauccucgugggggugaucaugauguuccugagccugggcgucggggcggaccagggcugcgccaucaacuucggcaagugaggacuagucccuguucccagagcccacuuuuuuuucuuuuuuugaaauaaaauagccugucuuucagaucuaaaaaaaaaaaaaaaaaaaaaaaaaaaaaaaaaaaaaaaaaaaaaaaaaaaaaaaaaaaaaaaagaauu

SEQ ID NO: 1312 - RNA, 2333 nt, Artificial Sequence
  mRNA product Design d-1 (A64-N5) comprising derived and/or modified sequence from YFV__NC_002031.1__X-SS-prME-XX (polyprotein: aa92-788) (opt1) R5362
gggagacccgugacccggaaguuguacggcuacgcgacuuucccucccacaaacccucgcgcccuuccuuuccuacuugggcccggcagaaagcuuaccaugcggggccugagcucccgcaagcggcgcagccacgacgugcucaccguccaguuccugauccuggggaugcuccugaugaccggcggggugacgcuggugcggaagaaccgcuggcuccugcugaacgucaccuccgaggaccucggcaagaccuucagcguggggaccggcaacugcacgaccaacauccuggaggccaaguacuggugccccgacuccauggaguacaacugcccgaaccugagcccccgggaggagcccgacgacaucgacugcuggugcuacggcguggagaacguccgcguggccuacgggaagugcgacuccgcgggccggagccgccggucccgccgggccaucgaccuccccacccacgagaaccacgggcugaagacccgccaggagaaguggaugacgggccggaugggggagcgccagcugcagaagaucgagcggugguucgugcgcaacccguucuucgccgucaccgcccucaccaucgccuaccuggugggcagcaacaugacccagcggguggucaucgcgcugcucgugcuggccgugggccccgccuacuccgcccacugcaucgggaucacggaccgcgacuucaucgagggcguccacgggggcaccugggugagcgcgacccuggagcaggacaagugcgugaccgucauggcccccgacaagcccucccucgacaucagccuggagacgguggccaucgaccggccggccgaggugcgcaaggucugcuacaacgccgugcugacccacgugaagaucaacgacaagugccccuccaccggcgaggcgcaccucgccgaggagaacgagggggacaacgccugcaagcggaccuacagcgaccggggcugggggaacggcugcgggcuguucggcaagggcuccaucgucgccugcgccaaguucacgugcgcgaaguccaugagccuguucgagguggaccagaccaagauccaguacgucauccgcgcccagcuccacgugggggccaagcaggagaacuggaacaccgacaucaagacccugaaguucgacgcccugagcggcagccaggagguggaguucaucggguacggcaaggccacgcucgagugccagguccagaccgcgguggacuucgggaacuccuacaucgccgagauggagaccgagagcuggaucguggaccggcagugggcccaggaccugacccugcccuggcaguccggcagcggcggggucuggcgcgagaugcaccaccucguggaguucgagcccccgcacgccgccacgauccgggugcuggcgcugggcaaccaggaggggucccucaagaccgcccugaccggcgccaugcgcgucaccaaggacacgaacgacaacaaccuguacaagcuccacgggggccacgugagcugccgggugaagcuguccgcccugacccucaagggcaccagcuacaagaucugcaccgacaagauguucuucgucaagaaccccacggacaccgggcacggcaccguggugaugcaggucaagguguccaagggggcgcccugccgcaucccggugaucgucgccgacgaccugaccgccgccaucaacaagggcauccuggugaccgugaacccgaucgccagcacgaacgacgacgagguccucaucgaggugaacccccccuucggcgacuccuacaucaucguggggcggggcgacagccgccugaccuaccaguggcacaaggagggguccagcaucggcaagcuguucacccagaccaugaagggggucgagcggcuggcggugaugggcgacacggccugggacuucuccagcgccggcggguucuucaccuccgugggcaaggggauccacaccgucuucggcagcgccuuccaggggcuguucggcggccucaacuggaucaccaaggugaucaugggggccgugcugaucugggucggcaucaacacgcgcaacaugaccauguccaugagcaugauccucgugggggugaucaugauguuccugagccugggcgucggggcggaccagggcugcgccaucaacuucggcaagugaggacuagucccuguucccagagcccacuuuuuuuucuuuuuuugaaauaaaauagccugucuuucagaucuaaaaaaaaaaaaaaaaaaaaaaaaaaaaaaaaaaaaaaaaaaaaaaaaaaaaaaaaaaaaaaaagaauu

SEQ ID NO: 1313 - RNA, 2484 nt, Artificial Sequence
  mRNA product Design d-5 (A64-N5) comprising derived and/or modified sequence from YFV__NC_002031.1__X-SS-prME-XX (polyprotein: aa92-788) (opt1) R5356
gggagagggcgcuuggcuugcaaggacccugagcugcggcauugaagcacacccaacccaacucgacugaagucagccucacugaaccggaucugagaaucuucucucucugggcuugccagggcucuccgaaccuagcuagcauccucuucaauuccaacuagaaagcuuaccaugcggggccugagcucccgcaagcggcgcagccacgacgugcucaccguccaguuccugauccuggggaugcuccugaugaccggcggggugacgcuggugcggaagaaccgcuggcuccugcugaacgucaccuccgaggaccucggcaagaccuucagcguggggaccggcaacugcacgaccaacauccuggaggccaaguacuggugccccgacuccauggaguacaacugcccgaaccugagcccccgggaggagcccgacgacaucgacugcuggugcuacggcguggagaacguccgcguggccuacgggaagugcgacuccgcgggccggagccgccggucccgccgggccaucgaccuccccacccacgagaaccacgggcugaagacccgccaggagaaguggaugacgggccggaugggggagcgccagcugcagaagaucgagcggugguucgugcgcaacccguucuucgccgucaccgcccucaccaucgccuaccuggugggcagcaacaugacccagcggguggucaucgcgcugcucgugcuggccgugggccccgccuacuccgcccacugcaucgggaucacggaccgcgacuucaucgagggcguccacgggggcaccugggugagcgcgacccuggagcaggacaagugcgugaccgucauggcccccgacaagcccucccucgacaucagccuggagacgguggccaucgaccggccggccgaggugcgcaaggucugcuacaacgccgugcugacccacgugaagaucaacgacaagugccccuccaccggcgaggcgcaccucgccgaggagaacgagggggacaacgccugcaagcggaccuacagcgaccggggcugggggaacggcugcgggcuguucggcaagggcuccaucgucgccugcgccaaguucacgugcgcgaaguccaugagccuguucgagguggaccagaccaagauccaguacgucauccgcgcccagcuccacgugggggccaagcaggagaacuggaacaccgacaucaagacccugaaguucgacgcccugagcggcagccaggagguggaguucaucggguacggcaaggccacgcucgagugccagguccagaccgcgguggacuucgggaacuccuacaucgccgagauggagaccgagagcuggaucguggaccggcagugggcccaggaccugacccugcccuggcaguccggcagcggcggggucuggcgcgagaugcaccaccucguggaguucgagcccccgcacgccgccacgauccgggugcuggcgcugggcaaccaggaggggucccucaagaccgcccugaccggcgccaugcgcgucaccaaggacacgaacgacaacaaccuguacaagcuccacgggggccacgugagcugccgggugaagcuguccgcccugacccucaagggcaccagcuacaagaucugcaccgacaagauguucuucgucaagaaccccacggacaccgggcacggcaccguggugaugcaggucaagguguccaagggggcgcccugccgcaucccggugaucgucgccgacgaccugaccgccgccaucaacaagggcauccuggugaccgugaacccgaucgccagcacgaacgacgacgagguccucaucgaggugaacccccccuucggcgacuccuacaucaucguggggcggggcgacagccgccugaccuaccaguggcacaaggagggguccagcaucggcaagcuguucacccagaccaugaagggggucgagcggcuggcggugaugggcgacacggccugggacuucuccagcgccggcggguucuucaccuccgugggcaaggggauccacaccgucuucggcagcgccuuccaggggcuguucggcggccucaacuggaucaccaaggugaucaugggggccgugcugaucugggucggcaucaacacgcgcaacaugaccauguccaugagcaugauccucgugggggugaucaugauguuccugagccugggcgucggggcggaccagggcugcgccaucaacuucggcaagugaggacuaguggaagcauuuuccuggcugauuaaaagaaauuacucagcuauggucaucuguuccuguuagaaggcuaugcagcauauuauauacuaugcgcauguuaugaaaugcauaauaaaaaauuuuaaaaaaucuaaaagaucuaaaaaaaaaaaaaaaaaaaaaaaaaaaaaaaaaaaaaaaaaaaaaaaaaaaaaaaaaaaaaaaagaauu

SEQ ID NO: 1314 - RNA, 2421 nt, Artificial Sequence
  mRNA product Design g-4 (A64-N5) comprising derived and/or modified sequence from YFV__NC_002031.1__X-SS-prME-XX (polyprotein: aa92-788) (opt1) R5360
gggagacuccugucgggcggaaguaggaggaguagaguuuaaaaacaguacucuuuuuccgguucgggacguaguugaagcaacgacaagccggauaaccgcucuugagacaggaagcuuaccaugcggggccugagcucccgcaagcggcgcagccacgacgugcucaccguccaguuccugauccuggggaugcuccugaugaccggcggggugacgcuggugcggaagaaccgcuggcuccugcugaacgucaccuccgaggaccucggcaagaccuucagcguggggaccggcaacugcacgaccaacauccuggaggccaaguacuggugccccgacuccauggaguacaacugcccgaaccugagcccccgggaggagcccgacgacaucgacugcuggugcuacggcguggagaacguccgcguggccuacgggaagugcgacuccgcgggccggagccgccggucccgccgggccaucgaccuccccacccacgagaaccacgggcugaagacccgccaggagaaguggaugacgggccggaugggggagcgccagcugcagaagaucgagcggugguucgugcgcaacccguucuucgccgucaccgcccucaccaucgccuaccuggugggcagcaacaugacccagcggguggucaucgcgcugcucgugcuggccgugggccccgccuacuccgcccacugcaucgggaucacggaccgcgacuucaucgagggcguccacgggggcaccugggugagcgcgacccuggagcaggacaagugcgugaccgucauggcccccgacaagcccucccucgacaucagccuggagacgguggccaucgaccggccggccgaggugcgcaaggucugcuacaacgccgugcugacccacgugaagaucaacgacaagugccccuccaccggcgaggcgcaccucgccgaggagaacgagggggacaacgccugcaagcggaccuacagcgaccggggcugggggaacggcugcgggcuguucggcaagggcuccaucgucgccugcgccaaguucacgugcgcgaaguccaugagccuguucgagguggaccagaccaagauccaguacgucauccgcgcccagcuccacgugggggccaagcaggagaacuggaacaccgacaucaagacccugaaguucgacgcccugagcggcagccaggagguggaguucaucggguacggcaaggccacgcucgagugccagguccagaccgcgguggacuucgggaacuccuacaucgccgagauggagaccgagagcuggaucguggaccggcagugggcccaggaccugacccugcccuggcaguccggcagcggcggggucuggcgcgagaugcaccaccucguggaguucgagcccccgcacgccgccacgauccgggugcuggcgcugggcaaccaggaggggucccucaagaccgcccugaccggcgccaugcgcgucaccaaggacacgaacgacaacaaccuguacaagcuccacgggggccacgugagcugccgggugaagcuguccgcccugacccucaagggcaccagcuacaagaucugcaccgacaagauguucuucgucaagaaccccacggacaccgggcacggcaccguggugaugcaggucaagguguccaagggggcgcccugccgcaucccggugaucgucgccgacgaccugaccgccgccaucaacaagggcauccuggugaccgugaacccgaucgccagcacgaacgacgacgagguccucaucgaggugaacccccccuucggcgacuccuacaucaucguggggcggggcgacagccgccugaccuaccaguggcacaaggagggguccagcaucggcaagcuguucacccagaccaugaagggggucgagcggcuggcggugaugggcgacacggccugggacuucuccagcgccggcggguucuucaccuccgugggcaaggggauccacaccgucuucggcagcgccuuccaggggcuguucggcggccucaacuggaucaccaaggugaucaugggggccgugcugaucugggucggcaucaacacgcgcaacaugaccauguccaugagcaugauccucgugggggugaucaugauguuccugagccugggcgucggggcggaccagggcugcgccaucaacuucggcaagugaggacuaguaauaaggaaacuguaugaaugucugugggcaggaagugaagagauccuucuguaaagguuuuuggaauuaugucugcugaauaauaaacuuuuuugaaauaauaaaucugguagaaaaaugagaucuaaaaaaaaaaaaaaaaaaaaaaaaaaaaaaaaaaaaaaaaaaaaaaaaaaaaaaaaaaaaaaaagaauu

SEQ ID NO: 1315 - RNA, 2472 nt, Artificial Sequence
  mRNA product Design h-4 (A64-N5) comprising derived and/or modified sequence from YFV__NC_002031.1__X-SS-prME-XX (polyprotein: aa92-788) (opt1) R5367
gggagagggcgcuuggcuugcaaggacccugagcugcggcauugaagcacacccaacccaacucgacugaagucagccucacugaaccggaucugagaaucuucucucucugggcuugccagggcucuccgaaccuagcuagcauccucuucaauuccaacuagaaagcuuaccaugcggggccugagcucccgcaagcggcgcagccacgacgugcucaccguccaguuccugauccuggggaugcuccugaugaccggcggggugacgcuggugcggaagaaccgcuggcuccugcugaacgucaccuccgaggaccucggcaagaccuucagcguggggaccggcaacugcacgaccaacauccuggaggccaaguacuggugccccgacuccauggaguacaacugcccgaaccugagcccccgggaggagcccgacgacaucgacugcuggugcuacggcguggagaacguccgcguggccuacgggaagugcgacuccgcgggccggagccgccggucccgccgggccaucgaccuccccacccacgagaaccacgggcugaagacccgccaggagaaguggaugacgggccggaugggggagcgccagcugcagaagaucgagcggugguucgugcgcaacccguucuucgccgucaccgcccucaccaucgccuaccuggugggcagcaacaugacccagcggguggucaucgcgcugcucgugcuggccgugggccccgccuacuccgcccacugcaucgggaucacggaccgcgacuucaucgagggcguccacgggggcaccugggugagcgcgacccuggagcaggacaagugcgugaccgucauggcccccgacaagcccucccucgacaucagccuggagacgguggccaucgaccggccggccgaggugcgcaaggucugcuacaacgccgugcugacccacgugaagaucaacgacaagugccccuccaccggcgaggcgcaccucgccgaggagaacgagggggacaacgccugcaagcggaccuacagcgaccggggcugggggaacggcugcgggcuguucggcaagggcuccaucgucgccugcgccaaguucacgugcgcgaaguccaugagccuguucgagguggaccagaccaagauccaguacgucauccgcgcccagcuccacgugggggccaagcaggagaacuggaacaccgacaucaagacccugaaguucgacgcccugagcggcagccaggagguggaguucaucggguacggcaaggccacgcucgagugccagguccagaccgcgguggacuucgggaacuccuacaucgccgagauggagaccgagagcuggaucguggaccggcagugggcccaggaccugacccugcccuggcaguccggcagcggcggggucuggcgcgagaugcaccaccucguggaguucgagcccccgcacgccgccacgauccgggugcuggcgcugggcaaccaggaggggucccucaagaccgcccugaccggcgccaugcgcgucaccaaggacacgaacgacaacaaccuguacaagcuccacgggggccacgugagcugccgggugaagcuguccgcccugacccucaagggcaccagcuacaagaucugcaccgacaagauguucuucgucaagaaccccacggacaccgggcacggcaccguggugaugcaggucaagguguccaagggggcgcccugccgcaucccggugaucgucgccgacgaccugaccgccgccaucaacaagggcauccuggugaccgugaacccgaucgccagcacgaacgacgacgagguccucaucgaggugaacccccccuucggcgacuccuacaucaucguggggcggggcgacagccgccugaccuaccaguggcacaaggagggguccagcaucggcaagcuguucacccagaccaugaagggggucgagcggcuggcggugaugggcgacacggccugggacuucuccagcgccggcggguucuucaccuccgugggcaaggggauccacaccgucuucggcagcgccuuccaggggcuguucggcggccucaacuggaucaccaaggugaucaugggggccgugcugaucugggucggcaucaacacgcgcaacaugaccauguccaugagcaugauccucgugggggugaucaugauguuccugagccugggcgucggggcggaccagggcugcgccaucaacuucggcaagugaggacuaguaauaaggaaacuguaugaaugucugugggcaggaagugaagagauccuucuguaaagguuuuuggaauuaugucugcugaauaauaaacuuuuuugaaauaauaaaucugguagaaaaaugagaucuaaaaaaaaaaaaaaaaaaaaaaaaaaaaaaaaaaaaaaaaaaaaaaaaaaaaaaaaaaaaaaaagaauu

SEQ ID NO: 1316 - RNA, 2488 nt, Artificial Sequence
  mRNA product Design h-5 (A64-N5) comprising derived and/or modified sequence from YFV__NC_002031.1__X-SS-prME-XX (polyprotein: aa92-788) (opt1) R5368
gggagagggcgcuuggcuugcaaggacccugagcugcggcauugaagcacacccaacccaacucgacugaagucagccucacugaaccggaucugagaaucuucucucucugggcuugccagggcucuccgaaccuagcuagcauccucuucaauuccaacuagaaagcuuaccaugcggggccugagcucccgcaagcggcgcagccacgacgugcucaccguccaguuccugauccuggggaugcuccugaugaccggcggggugacgcuggugcggaagaaccgcuggcuccugcugaacgucaccuccgaggaccucggcaagaccuucagcguggggaccggcaacugcacgaccaacauccuggaggccaaguacuggugccccgacuccauggaguacaacugcccgaaccugagcccccgggaggagcccgacgacaucgacugcuggugcuacggcguggagaacguccgcguggccuacgggaagugcgacuccgcgggccggagccgccggucccgccgggccaucgaccuccccacccacgagaaccacgggcugaagacccgccaggagaaguggaugacgggccggaugggggagcgccagcugcagaagaucgagcggugguucgugcgcaacccguucuucgccgucaccgcccucaccaucgccuaccuggugggcagcaacaugacccagcggguggucaucgcgcugcucgugcuggccgugggccccgccuacuccgcccacugcaucgggaucacggaccgcgacuucaucgagggcguccacgggggcaccugggugagcgcgacccuggagcaggacaagugcgugaccgucauggcccccgacaagcccucccucgacaucagccuggagacgguggccaucgaccggccggccgaggugcgcaaggucugcuacaacgccgugcugacccacgugaagaucaacgacaagugccccuccaccggcgaggcgcaccucgccgaggagaacgagggggacaacgccugcaagcggaccuacagcgaccggggcugggggaacggcugcgggcuguucggcaagggcuccaucgucgccugcgccaaguucacgugcgcgaaguccaugagccuguucgagguggaccagaccaagauccaguacgucauccgcgcccagcuccacgugggggccaagcaggagaacuggaacaccgacaucaagacccugaaguucgacgcccugagcggcagccaggagguggaguucaucggguacggcaaggccacgcucgagugccagguccagaccgcgguggacuucgggaacuccuacaucgccgagauggagaccgagagcuggaucguggaccggcagugggcccaggaccugacccugcccuggcaguccggcagcggcggggucuggcgcgagaugcaccaccucguggaguucgagcccccgcacgccgccacgauccgggugcuggcgcugggcaaccaggaggggucccucaagaccgcccugaccggcgccaugcgcgucaccaaggacacgaacgacaacaaccuguacaagcuccacgggggccacgugagcugccgggugaagcuguccgcccugacccucaagggcaccagcuacaagaucugcaccgacaagauguucuucgucaagaaccccacggacaccgggcacggcaccguggugaugcaggucaagguguccaagggggcgcccugccgcaucccggugaucgucgccgacgaccugaccgccgccaucaacaagggcauccuggugaccgugaacccgaucgccagcacgaacgacgacgagguccucaucgaggugaacccccccuucggcgacuccuacaucaucguggggcggggcgacagccgccugaccuaccaguggcacaaggagggguccagcaucggcaagcuguucacccagaccaugaagggggucgagcggcuggcggugaugggcgacacggccugggacuucuccagcgccggcggguucuucaccuccgugggcaaggggauccacaccgucuucggcagcgccuuccaggggcuguucggcggccucaacuggaucaccaaggugaucaugggggccgugcugaucugggucggcaucaacacgcgcaacaugaccauguccaugagcaugauccucgugggggugaucaugauguuccugagccugggcgucggggcggaccagggcugcgccaucaacuucggcaagugaggacuaguacuggcugcaucucccuuuccucuguccuccauccuucucccaggauggugaagggggaccugguacccagugauccccaccccaggauccuaaaucaugacuuaccugcuaauaaaaacucauuggaaaagugagaagaucuaaaaaaaaaaaaaaaaaaaaaaaaaaaaaaaaaaaaaaaaaaaaaaaaaaaaaaaaaaaaaaaagaauu

SEQ ID NO: 1317 - RNA, 2417 nt, Artificial Sequence
  mRNA product Design i-2  (A64-N5) comprising derived and/or modified sequence from YFV__NC_002031.1__X-SS-prME-XX (polyprotein: aa92-788) (opt1)
ggggcgcugccuacggagguggcagccaucuccuucucggcaucaagcuuaccaugcggggccugagcucccgcaagcggcgcagccacgacgugcucaccguccaguuccugauccuggggaugcuccugaugaccggcggggugacgcuggugcggaagaaccgcuggcuccugcugaacgucaccuccgaggaccucggcaagaccuucagcguggggaccggcaacugcacgaccaacauccuggaggccaaguacuggugccccgacuccauggaguacaacugcccgaaccugagcccccgggaggagcccgacgacaucgacugcuggugcuacggcguggagaacguccgcguggccuacgggaagugcgacuccgcgggccggagccgccggucccgccgggccaucgaccuccccacccacgagaaccacgggcugaagacccgccaggagaaguggaugacgggccggaugggggagcgccagcugcagaagaucgagcggugguucgugcgcaacccguucuucgccgucaccgcccucaccaucgccuaccuggugggcagcaacaugacccagcggguggucaucgcgcugcucgugcuggccgugggccccgccuacuccgcccacugcaucgggaucacggaccgcgacuucaucgagggcguccacgggggcaccugggugagcgcgacccuggagcaggacaagugcgugaccgucauggcccccgacaagcccucccucgacaucagccuggagacgguggccaucgaccggccggccgaggugcgcaaggucugcuacaacgccgugcugacccacgugaagaucaacgacaagugccccuccaccggcgaggcgcaccucgccgaggagaacgagggggacaacgccugcaagcggaccuacagcgaccggggcugggggaacggcugcgggcuguucggcaagggcuccaucgucgccugcgccaaguucacgugcgcgaaguccaugagccuguucgagguggaccagaccaagauccaguacgucauccgcgcccagcuccacgugggggccaagcaggagaacuggaacaccgacaucaagacccugaaguucgacgcccugagcggcagccaggagguggaguucaucggguacggcaaggccacgcucgagugccagguccagaccgcgguggacuucgggaacuccuacaucgccgagauggagaccgagagcuggaucguggaccggcagugggcccaggaccugacccugcccuggcaguccggcagcggcggggucuggcgcgagaugcaccaccucguggaguucgagcccccgcacgccgccacgauccgggugcuggcgcugggcaaccaggaggggucccucaagaccgcccugaccggcgccaugcgcgucaccaaggacacgaacgacaacaaccuguacaagcuccacgggggccacgugagcugccgggugaagcuguccgcccugacccucaagggcaccagcuacaagaucugcaccgacaagauguucuucgucaagaaccccacggacaccgggcacggcaccguggugaugcaggucaagguguccaagggggcgcccugccgcaucccggugaucgucgccgacgaccugaccgccgccaucaacaagggcauccuggugaccgugaacccgaucgccagcacgaacgacgacgagguccucaucgaggugaacccccccuucggcgacuccuacaucaucguggggcggggcgacagccgccugaccuaccaguggcacaaggagggguccagcaucggcaagcuguucacccagaccaugaagggggucgagcggcuggcggugaugggcgacacggccugggacuucuccagcgccggcggguucuucaccuccgugggcaaggggauccacaccgucuucggcagcgccuuccaggggcuguucggcggccucaacuggaucaccaaggugaucaugggggccgugcugaucugggucggcaucaacacgcgcaacaugaccauguccaugagcaugauccucgugggggugaucaugauguuccugagccugggcgucggggcggaccagggcugcgccaucaacuucggcaagugaggacuagugcaucacauuuaaaagcaucucagccuaccaugagaauaagagaaagaaaaugaagaucaauagcuuauucaucucuuuuucuuuuucguugguguaaagccaacacccugucuaaaaaacauaaauuucuuuaaucauuuugccucuuuucucugugcuucaauuaauaaaaaauggaaagaaccuagaucuaaaaaaaaaaaaaaaaaaaaaaaaaaaaaaaaaaaaaaaaaaaaaaaaaaaaaaaaaaaaaaaagaauu

SEQ ID NO: 1318 - RNA, 2421 nt, Artificial Sequence
  mRNA product Design i-2 (A64-N5) comprising derived and/or modified sequence from YFV__NC_002031.1__X-SS-prME-XX (polyprotein: aa92-788) (opt1) R5372
gggagaggcgcugccuacggagguggcagccaucuccuucucggcaucaagcuuaccaugcggggccugagcucccgcaagcggcgcagccacgacgugcucaccguccaguuccugauccuggggaugcuccugaugaccggcggggugacgcuggugcggaagaaccgcuggcuccugcugaacgucaccuccgaggaccucggcaagaccuucagcguggggaccggcaacugcacgaccaacauccuggaggccaaguacuggugccccgacuccauggaguacaacugcccgaaccugagcccccgggaggagcccgacgacaucgacugcuggugcuacggcguggagaacguccgcguggccuacgggaagugcgacuccgcgggccggagccgccggucccgccgggccaucgaccuccccacccacgagaaccacgggcugaagacccgccaggagaaguggaugacgggccggaugggggagcgccagcugcagaagaucgagcggugguucgugcgcaacccguucuucgccgucaccgcccucaccaucgccuaccuggugggcagcaacaugacccagcggguggucaucgcgcugcucgugcuggccgugggccccgccuacuccgcccacugcaucgggaucacggaccgcgacuucaucgagggcguccacgggggcaccugggugagcgcgacccuggagcaggacaagugcgugaccgucauggcccccgacaagcccucccucgacaucagccuggagacgguggccaucgaccggccggccgaggugcgcaaggucugcuacaacgccgugcugacccacgugaagaucaacgacaagugccccuccaccggcgaggcgcaccucgccgaggagaacgagggggacaacgccugcaagcggaccuacagcgaccggggcugggggaacggcugcgggcuguucggcaagggcuccaucgucgccugcgccaaguucacgugcgcgaaguccaugagccuguucgagguggaccagaccaagauccaguacgucauccgcgcccagcuccacgugggggccaagcaggagaacuggaacaccgacaucaagacccugaaguucgacgcccugagcggcagccaggagguggaguucaucggguacggcaaggccacgcucgagugccagguccagaccgcgguggacuucgggaacuccuacaucgccgagauggagaccgagagcuggaucguggaccggcagugggcccaggaccugacccugcccuggcaguccggcagcggcggggucuggcgcgagaugcaccaccucguggaguucgagcccccgcacgccgccacgauccgggugcuggcgcugggcaaccaggaggggucccucaagaccgcccugaccggcgccaugcgcgucaccaaggacacgaacgacaacaaccuguacaagcuccacgggggccacgugagcugccgggugaagcuguccgcccugacccucaagggcaccagcuacaagaucugcaccgacaagauguucuucgucaagaaccccacggacaccgggcacggcaccguggugaugcaggucaagguguccaagggggcgcccugccgcaucccggugaucgucgccgacgaccugaccgccgccaucaacaagggcauccuggugaccgugaacccgaucgccagcacgaacgacgacgagguccucaucgaggugaacccccccuucggcgacuccuacaucaucguggggcggggcgacagccgccugaccuaccaguggcacaaggagggguccagcaucggcaagcuguucacccagaccaugaagggggucgagcggcuggcggugaugggcgacacggccugggacuucuccagcgccggcggguucuucaccuccgugggcaaggggauccacaccgucuucggcagcgccuuccaggggcuguucggcggccucaacuggaucaccaaggugaucaugggggccgugcugaucugggucggcaucaacacgcgcaacaugaccauguccaugagcaugauccucgugggggugaucaugauguuccugagccugggcgucggggcggaccagggcugcgccaucaacuucggcaagugaggacuagugcaucacauuuaaaagcaucucagccuaccaugagaauaagagaaagaaaaugaagaucaauagcuuauucaucucuuuuucuuuuucguugguguaaagccaacacccugucuaaaaaacauaaauuucuuuaaucauuuugccucuuuucucugugcuucaauuaauaaaaaauggaaagaaccuagaucuaaaaaaaaaaaaaaaaaaaaaaaaaaaaaaaaaaaaaaaaaaaaaaaaaaaaaaaaaaaaaaaagaauu

SEQ ID NO: 1319 - RNA, 2258 nt, Artificial Sequence
  mRNA product Design i-3 (A64-N5) comprising derived and/or modified sequence from YFV__NC_002031.1__X-SS-prME-XX (polyprotein: aa92-788) (opt1)
gggagaaagcuuaccaugcggggccugagcucccgcaagcggcgcagccacgacgugcucaccguccaguuccugauccuggggaugcuccugaugaccggcggggugacgcuggugcggaagaaccgcuggcuccugcugaacgucaccuccgaggaccucggcaagaccuucagcguggggaccggcaacugcacgaccaacauccuggaggccaaguacuggugccccgacuccauggaguacaacugcccgaaccugagcccccgggaggagcccgacgacaucgacugcuggugcuacggcguggagaacguccgcguggccuacgggaagugcgacuccgcgggccggagccgccggucccgccgggccaucgaccuccccacccacgagaaccacgggcugaagacccgccaggagaaguggaugacgggccggaugggggagcgccagcugcagaagaucgagcggugguucgugcgcaacccguucuucgccgucaccgcccucaccaucgccuaccuggugggcagcaacaugacccagcggguggucaucgcgcugcucgugcuggccgugggccccgccuacuccgcccacugcaucgggaucacggaccgcgacuucaucgagggcguccacgggggcaccugggugagcgcgacccuggagcaggacaagugcgugaccgucauggcccccgacaagcccucccucgacaucagccuggagacgguggccaucgaccggccggccgaggugcgcaaggucugcuacaacgccgugcugacccacgugaagaucaacgacaagugccccuccaccggcgaggcgcaccucgccgaggagaacgagggggacaacgccugcaagcggaccuacagcgaccggggcugggggaacggcugcgggcuguucggcaagggcuccaucgucgccugcgccaaguucacgugcgcgaaguccaugagccuguucgagguggaccagaccaagauccaguacgucauccgcgcccagcuccacgugggggccaagcaggagaacuggaacaccgacaucaagacccugaaguucgacgcccugagcggcagccaggagguggaguucaucggguacggcaaggccacgcucgagugccagguccagaccgcgguggacuucgggaacuccuacaucgccgagauggagaccgagagcuggaucguggaccggcagugggcccaggaccugacccugcccuggcaguccggcagcggcggggucuggcgcgagaugcaccaccucguggaguucgagcccccgcacgccgccacgauccgggugcuggcgcugggcaaccaggaggggucccucaagaccgcccugaccggcgccaugcgcgucaccaaggacacgaacgacaacaaccuguacaagcuccacgggggccacgugagcugccgggugaagcuguccgcccugacccucaagggcaccagcuacaagaucugcaccgacaagauguucuucgucaagaaccccacggacaccgggcacggcaccguggugaugcaggucaagguguccaagggggcgcccugccgcaucccggugaucgucgccgacgaccugaccgccgccaucaacaagggcauccuggugaccgugaacccgaucgccagcacgaacgacgacgagguccucaucgaggugaacccccccuucggcgacuccuacaucaucguggggcggggcgacagccgccugaccuaccaguggcacaaggagggguccagcaucggcaagcuguucacccagaccaugaagggggucgagcggcuggcggugaugggcgacacggccugggacuucuccagcgccggcggguucuucaccuccgugggcaaggggauccacaccgucuucggcagcgccuuccaggggcuguucggcggccucaacuggaucaccaaggugaucaugggggccgugcugaucugggucggcaucaacacgcgcaacaugaccauguccaugagcaugauccucgugggggugaucaugauguuccugagccugggcgucggggcggaccagggcugcgccaucaacuucggcaagugaggacuaguuauaagacugacuagcccgaugggccucccaacgggcccuccuccccuccuugcaccgagauuaauagaucuaaaaaaaaaaaaaaaaaaaaaaaaaaaaaaaaaaaaaaaaaaaaaaaaaaaaaaaaaaaaaaaagaauu

SEQ ID NO: 1320 - RNA, 2357 nt, Artificial Sequence
  mRNA product Design a-4 (A64-N5) comprising derived and/or modified sequence from YFV__NC_002031.1__X-SS-prME-XX (polyprotein: aa92-788) (opt1) R5364
gggagacuccugucgggcggaaguaggaggaguagaguuuaaaaacaguacucuuuuuccgguucgggacguaguugaagcaacgacaagccggauaaccgcucuugagacaggaagcuuaccaugcggggccugagcucccgcaagcggcgcagccacgacgugcucaccguccaguuccugauccuggggaugcuccugaugaccggcggggugacgcuggugcggaagaaccgcuggcuccugcugaacgucaccuccgaggaccucggcaagaccuucagcguggggaccggcaacugcacgaccaacauccuggaggccaaguacuggugccccgacuccauggaguacaacugcccgaaccugagcccccgggaggagcccgacgacaucgacugcuggugcuacggcguggagaacguccgcguggccuacgggaagugcgacuccgcgggccggagccgccggucccgccgggccaucgaccuccccacccacgagaaccacgggcugaagacccgccaggagaaguggaugacgggccggaugggggagcgccagcugcagaagaucgagcggugguucgugcgcaacccguucuucgccgucaccgcccucaccaucgccuaccuggugggcagcaacaugacccagcggguggucaucgcgcugcucgugcuggccgugggccccgccuacuccgcccacugcaucgggaucacggaccgcgacuucaucgagggcguccacgggggcaccugggugagcgcgacccuggagcaggacaagugcgugaccgucauggcccccgacaagcccucccucgacaucagccuggagacgguggccaucgaccggccggccgaggugcgcaaggucugcuacaacgccgugcugacccacgugaagaucaacgacaagugccccuccaccggcgaggcgcaccucgccgaggagaacgagggggacaacgccugcaagcggaccuacagcgaccggggcugggggaacggcugcgggcuguucggcaagggcuccaucgucgccugcgccaaguucacgugcgcgaaguccaugagccuguucgagguggaccagaccaagauccaguacgucauccgcgcccagcuccacgugggggccaagcaggagaacuggaacaccgacaucaagacccugaaguucgacgcccugagcggcagccaggagguggaguucaucggguacggcaaggccacgcucgagugccagguccagaccgcgguggacuucgggaacuccuacaucgccgagauggagaccgagagcuggaucguggaccggcagugggcccaggaccugacccugcccuggcaguccggcagcggcggggucuggcgcgagaugcaccaccucguggaguucgagcccccgcacgccgccacgauccgggugcuggcgcugggcaaccaggaggggucccucaagaccgcccugaccggcgccaugcgcgucaccaaggacacgaacgacaacaaccuguacaagcuccacgggggccacgugagcugccgggugaagcuguccgcccugacccucaagggcaccagcuacaagaucugcaccgacaagauguucuucgucaagaaccccacggacaccgggcacggcaccguggugaugcaggucaagguguccaagggggcgcccugccgcaucccggugaucgucgccgacgaccugaccgccgccaucaacaagggcauccuggugaccgugaacccgaucgccagcacgaacgacgacgagguccucaucgaggugaacccccccuucggcgacuccuacaucaucguggggcggggcgacagccgccugaccuaccaguggcacaaggagggguccagcaucggcaagcuguucacccagaccaugaagggggucgagcggcuggcggugaugggcgacacggccugggacuucuccagcgccggcggguucuucaccuccgugggcaaggggauccacaccgucuucggcagcgccuuccaggggcuguucggcggccucaacuggaucaccaaggugaucaugggggccgugcugaucugggucggcaucaacacgcgcaacaugaccauguccaugagcaugauccucgugggggugaucaugauguuccugagccugggcgucggggcggaccagggcugcgccaucaacuucggcaagugaggacuagucccuguucccagagcccacuuuuuuuucuuuuuuugaaauaaaauagccugucuuucagaucuaaaaaaaaaaaaaaaaaaaaaaaaaaaaaaaaaaaaaaaaaaaaaaaaaaaaaaaaaaaaaaaagaauu

SEQ ID NO: 1321 - protein, 18 aa, Artificial Sequence
  derived and/or modified protein sequence (artificial) from Artificial____carrier peptide 5
CGHHHHHRRRRHHHHHGC

SEQ ID NO: 1322 - RNA, 6 nt, Artificial Sequence
  mRNA 5'-end
aggaga

SEQ ID NO: 1323 - RNA, 134 nt, Artificial Sequence
  mRNA 3'-end N6-A64-N5-C30-histoneSL-N5
auuaauaaaaaaaaaaaaaaaaaaaaaaaaaaaaaaaaaaaaaaaaaaaaaaaaaaaaaaaaaaaaaaaaugcaucccccccccccccccccccccccccccccccaaaggcucuuuucagagccaccagaauu

SEQ ID NO: 1324 - RNA, 99 nt, Artificial Sequence
  mRNA 3'-end N6-histoneSL-A64-N5
auuaaucaaaggcucuuuucagagccaccaaaaaaaaaaaaaaaaaaaaaaaaaaaaaaaaaaaaaaaaaaaaaaaaaaaaaaaaaaaaaaaaagaauu

SEQ ID NO: 1325 - RNA, 99 nt, Artificial Sequence
  mRNA 3'-end N6-histoneSL-A64-N5
agaucucaaaggcucuuuucagagccaccaaaaaaaaaaaaaaaaaaaaaaaaaaaaaaaaaaaaaaaaaaaaaaaaaaaaaaaaaaaaaaaaagaauu

SEQ ID NO: 1326 - RNA, 110 nt, Artificial Sequence
  mRNA 3'-end N12-A64-N5-histoneSL-N5
auuaauagaucuaaaaaaaaaaaaaaaaaaaaaaaaaaaaaaaaaaaaaaaaaaaaaaaaaaaaaaaaaaaaaaaaugcaucaaaggcucuuuucagagccaccagaauu

SEQ ID NO: 1327 - RNA, 110 nt, Artificial Sequence; identical to SEQ ID NO: 1326
  mRNA 3'-end N12-A64-N5-histoneSL-N5

SEQ ID NO: 1328 - RNA, 130 nt, Artificial Sequence
  mRNA 3'-end N6-histoneSL-A100
auuaaucaaaggcucuuuucagagccaccaaaaaaaaaaaaaaaaaaaaaaaaaaaaaaaaaaaaaaaaaaaaaaaaaaaaaaaaaaaaaaaaaaaaaaaaaaaaaaaaaaaaaaaaaaaaaaaaaaaaa

SEQ ID NO: 1329 - RNA, 130 nt, Artificial Sequence
  mRNA 3'-end N6-histoneSL-A100
agaucucaaaggcucuuuucagagccaccaaaaaaaaaaaaaaaaaaaaaaaaaaaaaaaaaaaaaaaaaaaaaaaaaaaaaaaaaaaaaaaaaaaaaaaaaaaaaaaaaaaaaaaaaaaaaaaaaaaaa

SEQ ID NO: 1330 - protein, 24 aa, Artificial Sequence
  derived and/or modified protein sequence (wt) from Homo sapiens__AAA59606.1__signal peptide_HLA-A2-SP
MAVMAPRTLVLLLSGALALTQTWA

SEQ ID NO: 1331 - protein, 22 aa, Artificial Sequence
  derived and/or modified protein sequence (wt) from Homo sapiens__AAA61213.1__signal peptide_HsPLAT
MDAMKRGLCCVLLLCGAVFVSP

SEQ ID NO: 1332 - protein, 27 aa, Artificial Sequence
  derived and/or modified protein sequence (wt) from Homo sapiens__NP_000790.2__signal peptide_HsEPO
MGVHECPAWLWLLLSLLSLPLGLPVLG

SEQ ID NO: 1333 - protein, 18 aa, Artificial Sequence
  derived and/or modified protein sequence (wt) from Homo sapiens__NP_000468.1__signal peptide_HsALB
MKWVTFISLLFLFSSAYS

SEQ ID NO: 1334 - protein, 24 aa, Artificial Sequence
  derived and/or modified protein sequence (wt) from Homo sapiens__NP_055022.2__signal peptide_HsCD5
MPMGSLQPLATLYLLGMLVASCLG

SEQ ID NO: 1335 - protein, 20 aa, Artificial Sequence
  derived and/or modified protein sequence (wt) from Homo sapiens__NP_000577.2__signal peptide_HsIL2
MYRMQLLSCIALSLALVTNS

SEQ ID NO: 1336 - protein, 18 aa, Artificial Sequence
  derived and/or modified protein sequence (wt) from Homo sapiens__NP_001020371.3 __signal peptide_HsCTRB2
MAFLWLLSCWALLGTTFG

SEQ ID NO: 1337 - protein, 19 aa, Artificial Sequence
  derived and/or modified protein sequence (wt) from Homo sapiens__BAC87457.1__signal peptide_IgG-HC
MEFGLSWVFLVALFRGVQC

SEQ ID NO: 1338 - protein, 19 aa, Artificial Sequence
  derived and/or modified protein sequence (wt) from Homo sapiens__AAA52897.1__signal peptide_Ig-HC
MDWTWRVFCLLAVTPGAHP

SEQ ID NO: 1339 - protein, 19 aa, Artificial Sequence
  derived and/or modified protein sequence (wt) from Homo sapiens__AAA59018.1__signal peptide_Ig-LC
MAWSPLFLTLITHCAGSWA

SEQ ID NO: 1340 - protein, 17 aa, Artificial Sequence
  derived and/or modified protein sequence (wt) from Gaussia princeps__AAG54095.1__signal peptide_GpLuc
MGVKVLFALICIAVAEA

SEQ ID NO: 1341 - protein, 21 aa, Artificial Sequence
  derived and/or modified protein sequence (wt) from Mus musculus__BAR42292.1__signal peptide_MmIgkappa
METDTLLLWVLLLWVPGSTGD

SEQ ID NO: 1342 - protein, 26 aa, Artificial Sequence
  derived and/or modified protein sequence (wt) from Nepenthes rafflesiana__ABF74624.1__signal peptide_NrChit1
MKTHYSSAILPILTLFVFLSINPSHG

SEQ ID NO: 1343 - protein, 21 aa, Artificial Sequence
  derived and/or modified protein sequence (wt) from Conus leopardus__AAS93426.1__signal peptide_ClLp1.3
MGMRMMFIMFMLVVLATTVVS

SEQ ID NO: 1344 - protein, 24 aa, Artificial Sequence
  derived and/or modified protein sequence (wt) from Nepenthes gracilis__AB114914.1__signal peptide_NgNep1
MASSLYSFLLALSIVYIFVAPTHS

SEQ ID NO: 1345 - protein, 19 aa, Artificial Sequence
  derived and/or modified protein sequence (wt) from Homo sapiens__NP_001691.1__signal peptide_HsAzu1
MTRLTVLALLAGLLASSRA

SEQ ID NO: 1346 - protein, 16 aa, Artificial Sequence
  derived and/or modified protein sequence (wt) from Homo sapiens__AAA51948.1__signal peptide_HsCD33
MPLLLLLPLLWAGALA

SEQ ID NO: 1347 - protein, 19 aa, Artificial Sequence
  derived and/or modified protein sequence (wt) from Vibrio cholerae__BAA06291.1__signal peptide_VcCtxB
MIKLKFGVFFTVLLSSAYA

SEQ ID NO: 1348 - protein, 20 aa, Artificial Sequence
  derived and/or modified protein sequence (wt) from Homo sapiens__NP_001890.1__signal peptide_HsCST4
MARPLCTLLLLMATLAGALA

SEQ ID NO: 1349 - protein, 24 aa, Artificial Sequence
  derived and/or modified protein sequence (wt) from Homo sapiens__AAA59172.1__signal peptide_HsIns-iso1
MALWMRLLPLLALLALWGPDPAAA

SEQ ID NO: 1350 - protein, 17 aa, Artificial Sequence
  derived and/or modified protein sequence (wt) from Homo sapiens__CAA68724.1__signal peptide_HsSPARC
MRAWIFFLLCLAGRALA

SEQ ID NO: 1351 - protein, 17 aa, Artificial Sequence
  derived and/or modified protein sequence (wt) from Inluenza A__ACQ45338.1__signal peptide_H1N1(Netherlands2009)-HA
MKAILVVLLYTFATANA

SEQ ID NO: 1352 - protein, 30 aa, Artificial Sequence
  derived and/or modified protein sequence (wt) from Yellow fever virus__NP_041726.1__signal peptide_YFV
MRGLSSRKRRSHDVLTVQFLILGMLLMTGG

SEQ ID NO: 1353 - protein, 25 aa, Artificial Sequence
  derived and/or modified protein sequence (wt) from Homo sapiens__CAA23783.1__signal peptide_MHCII
MAISGVPVLGFFIIAVLMSAQESWA

SEQ ID NO: 1354 - protein, 17 aa, Artificial Sequence
  derived and/or modified protein sequence (wt) from Vesicular stomatitis Indiana virus__NP_041715.1 __signal peptide_VSIV-G
MKCLLYLAFLFIGVNCK

SEQ ID NO: 1355 - protein, 17 aa, Artificial Sequence
  derived and/or modified protein sequence (wt) from Vesicular stomatitis Indiana virus__NP_041715.1 __signal peptide_VSIV-G(K17A)
MKCLLYLAFLFIGVNCA

SEQ ID NO: 1356 - protein, 20 aa, Artificial Sequence
  derived and/or modified protein sequence (wt) from Homo sapiens__AAH62704.1__signal peptide_HsIGK@
METPAQLLFLLLLWLPDTTG

SEQ ID NO: 1357 - protein, 20 aa, Artificial Sequence
  derived and/or modified protein sequence (wt) from Homo sapiens__NP_000575.1__signal peptide_HsCXCL8
MTSKLAVALLAAFLISAALC

SEQ ID NO: 1358 - RNA, 72 nt, Artificial Sequence
  derived and/or modified CDS sequence (wt) from Homo sapiens__AAA59606.1__signal peptide_HLA-A2-SP
auggccgucauggcgccccgaacccucguccugcuacucucgggggcucuggcccugacccagaccugggcg

SEQ ID NO: 1359 - RNA, 66 nt, Artificial Sequence
  derived and/or modified CDS sequence (wt) from Homo sapiens__AAA61213.1__signal peptide_HsPLAT
auggaugcaaugaagagagggcucugcugugugcugcugcuguguggagcagucuucguuucgccc

SEQ ID NO: 1360 - RNA, 81 nt, Artificial Sequence
  derived and/or modified CDS sequence (wt) from Homo sapiens__NP_000790.2__signal peptide_HsEPO
augggggugcacgaauguccugccuggcuguggcuucuccugucccugcugucgcucccucugggccucccaguccugggc

SEQ ID NO: 1361 - RNA, 54 nt, Artificial Sequence
  derived and/or modified CDS sequence (wt) from Homo sapiens__NP_000468.1__signal peptide_HsALB
augaaguggguaaccuuuauuucccuucuuuuucucuuuagcucggcuuauucc

SEQ ID NO: 1362 - RNA, 72 nt, Artificial Sequence
  derived and/or modified CDS sequence (wt) from Homo sapiens__NP_055022.2__signal peptide_HsCD5
augcccauggggucucugcaaccgcuggccaccuuguaccugcuggggaugcuggucgcuuccugccucgga

SEQ ID NO: 1363 - RNA, 60 nt, Artificial Sequence
  derived and/or modified CDS sequence (wt) from Homo sapiens__NP_000577.2__signal peptide_HsIL2
auguacaggaugcaacuccugucuugcauugcacuaagucuugcacuugucacaaacagu

SEQ ID NO: 1364 - RNA, 54 nt, Artificial Sequence
  derived and/or modified CDS sequence (wt) from Homo sapiens__NP_001020371.3 __signal peptide_HsCTRB2
auggcuuuccucuggcuccucuccugcugggcccuccuggguaccaccuucggc

SEQ ID NO: 1365 - RNA, 57 nt, Artificial Sequence
  derived and/or modified CDS sequence (wt) from Homo sapiens__BAC87457.1__signal peptide_IgG-HC
auggaguuugggcugagcuggguuuuccucguugcucuuuuuagagguguccagugu

SEQ ID NO: 1366 - RNA, 57 nt, Artificial Sequence
  derived and/or modified CDS sequence (wt) from Homo sapiens__AAA52897.1__signal peptide_Ig-HC
auggacuggaccuggagggucuucuguuugcuggcuguaacuccaggcgcccacccc

SEQ ID NO: 1367 - RNA, 57 nt, Artificial Sequence
  derived and/or modified CDS sequence (wt) from Homo sapiens__AAA59018.1__signal peptide_Ig-LC
auggccugguccccucucuuccucacccucaucacucacugugcaggguccugggcc

SEQ ID NO: 1368 - RNA, 51 nt, Artificial Sequence
  derived and/or modified CDS sequence (wt) from Gaussia princeps__AAG54095.1__signal peptide_GpLuc
augggagugaaaguucuuuuugcccuuauuuguauugcuguggccgaggcc

SEQ ID NO: 1369 - RNA, 63 nt, Artificial Sequence
  derived and/or modified CDS sequence (wt) from Mus musculus__BAR42292.1__signal peptide_MmIgkappa
auggagacagacacacuccugcuaugggugcugcugcucuggguuccagguuccacaggugac

SEQ ID NO: 1370 - RNA, 78 nt, Artificial Sequence
  derived and/or modified CDS sequence (wt) from Nepenthes rafflesiana__ABF74624.1__signal peptide_NrChit1
augaagacccauuauucaucagcaauucucccgauccucacccucuucgucuuucucucgaucaauccaucccauggc

SEQ ID NO: 1371 - RNA, 63 nt, Artificial Sequence
  derived and/or modified CDS sequence (wt) from Conus leopardus__AAS93426.1__signal peptide_ClLp1.3
augggcaugcggaugauguucaucauguuuaugcugguugucuuggcaaccacugucguuucc

SEQ ID NO: 1372 - RNA, 72 nt, Artificial Sequence
  derived and/or modified CDS sequence (wt) from Nepenthes gracilis__AB114914.1__signal peptide_NgNep1
auggccucgucgcuguauucuuucuuacucgcauuaucgauaguuuacaucuuuguugccccaacacauucu

SEQ ID NO: 1373 - RNA, 57 nt, Artificial Sequence
  derived and/or modified CDS sequence (wt) from Homo sapiens__NP_001691.1__signal peptide_HsAzu1
augacccggcugacaguccuggcccugcuggcuggucugcuggcguccucgagggcc

SEQ ID NO: 1374 - RNA, 48 nt, Artificial Sequence
  derived and/or modified CDS sequence (wt) from Homo sapiens__AAA51948.1__signal peptide_HsCD33
augccgcugcugcuacugcugccccugcugugggcaggggcccuggcu

SEQ ID NO: 1375 - RNA, 57 nt, Artificial Sequence
  derived and/or modified CDS sequence (wt) from Vibrio cholerae__BAA06291.1__signal peptide_VcCtxB
augauuaaauuaaaauuugguguuuuuuuuacaguuuuacuaucuucagcauaugca

SEQ ID NO: 1376 - RNA, 60 nt, Artificial Sequence
  derived and/or modified CDS sequence (wt) from Homo sapiens__NP_001890.1__signal peptide_HsCST4
auggcccggccucuguguacccugcuacuccugauggcuacccuggcuggggcucuggcc

SEQ ID NO: 1377 - RNA, 72 nt, Artificial Sequence
  derived and/or modified CDS sequence (wt) from Homo sapiens__AAA59172.1__signal peptide_HsIns-iso1
auggcccuguggaugcgccuccugccccugcuggcgcugcuggcccucuggggaccugacccagccgcagcc

SEQ ID NO: 1378 - RNA, 51 nt, Artificial Sequence
  derived and/or modified CDS sequence (wt) from Homo sapiens__CAA68724.1__signal peptide_HsSPARC
augagggccuggaucuucuuucuccuuugccuggccgggagggcucuggca

SEQ ID NO: 1379 - RNA, 51 nt, Artificial Sequence
  derived and/or modified CDS sequence (wt) from Inluenza A__ACQ45338.1__signal peptide_H1N1(Netherlands2009)-HA
augaaggcaauacuaguaguucugcuauauacauuugcaaccgcaaaugca

SEQ ID NO: 1380 - RNA, 90 nt, Artificial Sequence
  derived and/or modified CDS sequence (wt) from Yellow fever virus__NP_041726.1__signal peptide_YFV
augagaggauuguccucaaggaaacgccguucccaugauguucugacugugcaauuccuaauuuugggaaugcuguugaugacgggugga

SEQ ID NO: 1381 - RNA, 75 nt, Artificial Sequence
  derived and/or modified CDS sequence (wt) from Homo sapiens__CAA23783.1__signal peptide_MHCII
auggccauaaguggagucccugugcuaggauuuuucaucauagcugugcugaugagcgcucaggaaucaugggcu

SEQ ID NO: 1382 - RNA, 51 nt, Artificial Sequence
  derived and/or modified CDS sequence (wt) from Vesicular stomatitis Indiana virus__NP_041715.1 __signal peptide_VSIV-G
augaagugccuuuuguacuuagccuuuuuauucauuggggugaauugcaag

SEQ ID NO: 1383 - RNA, 51 nt, Artificial Sequence
  derived and/or modified CDS sequence (wt) from Vesicular stomatitis Indiana virus__NP_041715.1 __signal peptide_VSIV-G(K17A)
augaagugccuuuuguacuuagccuuuuuauucauuggggugaauugcgcc

SEQ ID NO: 1384 - RNA, 60 nt, Artificial Sequence
  derived and/or modified CDS sequence (wt) from Homo sapiens__AAH62704.1__signal peptide_HsIGK@
auggaaaccccagcgcagcuucucuuccuccugcuacucuggcucccagauacuaccgga

SEQ ID NO: 1385 - RNA, 60 nt, Artificial Sequence
  derived and/or modified CDS sequence (wt) from Homo sapiens__NP_000575.1__signal peptide_HsCXCL8
augacuuccaagcuggccguggcucucuuggcagccuuccugauuucugcagcucugugu

SEQ ID NO: 1386 - RNA, 72 nt, Artificial Sequence
  derived and/or modified CDS sequence (opt1) from Homo sapiens__AAA59606.1__signal peptide_HLA-A2-SP
auggccgugauggccccgcggacccugguccuccugcugagcggcgcgcucgcccugacccagacgugggcc

SEQ ID NO: 1387 - RNA, 66 nt, Artificial Sequence
  derived and/or modified CDS sequence (opt1) from Homo sapiens__AAA61213.1__signal peptide_HsPLAT
auggacgccaugaagcgcggccugugcugcgugcuccugcugugcggggccgucuucgugagcccc

SEQ ID NO: 1388 - RNA, 81 nt, Artificial Sequence
  derived and/or modified CDS sequence (opt1) from Homo sapiens__NP_000790.2__signal peptide_HsEPO
augggcgugcacgagugccccgccuggcuguggcuccugcugagccuccugucccugccgcucgggcugcccguccugggc

SEQ ID NO: 1389 - RNA, 54 nt, Artificial Sequence
  derived and/or modified CDS sequence (opt1) from Homo sapiens__NP_000468.1__signal peptide_HsALB
augaagugggugaccuucaucagccugcucuuccuguucuccagcgccuacucc

SEQ ID NO: 1390 - RNA, 72 nt, Artificial Sequence
  derived and/or modified CDS sequence (opt1) from Homo sapiens__NP_055022.2__signal peptide_HsCD5
augcccaugggcagccugcagccgcucgccacccuguaccugcucgggaugcugguggccuccugccugggc

SEQ ID NO: 1391 - RNA, 60 nt, Artificial Sequence
  derived and/or modified CDS sequence (opt1) from Homo sapiens__NP_000577.2__signal peptide_HsIL2
auguaccggaugcagcugcucagcugcaucgcccugucgcuggcgcucgugaccaacagc

SEQ ID NO: 1392 - RNA, 54 nt, Artificial Sequence
  derived and/or modified CDS sequence (opt1) from Homo sapiens__NP_001020371.3 __signal peptide_HsCTRB2
auggccuuccuguggcuccugagcugcugggcccugcucggcaccaccuucggg

SEQ ID NO: 1393 - RNA, 57 nt, Artificial Sequence
  derived and/or modified CDS sequence (opt1) from Homo sapiens__BAC87457.1__signal peptide_IgG-HC
auggaguucggccugagcuggguguuccucgucgcccuguuccgcggggugcagugc

SEQ ID NO: 1394 - RNA, 57 nt, Artificial Sequence
  derived and/or modified CDS sequence (opt1) from Homo sapiens__AAA52897.1__signal peptide_Ig-HC
auggacuggaccuggcgcguguucugccugcucgccgucacccccggcgcccacccg

SEQ ID NO: 1395 - RNA, 57 nt, Artificial Sequence
  derived and/or modified CDS sequence (opt1) from Homo sapiens__AAA59018.1__signal peptide_Ig-LC
auggccuggagcccccuguuccucacccugaucacccacugcgccggcuccugggcg

SEQ ID NO: 1396 - RNA, 51 nt, Artificial Sequence
  derived and/or modified CDS sequence (opt1) from Gaussia princeps__AAG54095.1__signal peptide_GpLuc
augggcgugaagguccuguucgcccucaucugcaucgccguggcggaggcc

SEQ ID NO: 1397 - RNA, 63 nt, Artificial Sequence
  derived and/or modified CDS sequence (opt1) from Mus musculus__BAR42292.1__signal peptide_MmIgkappa
auggagaccgacacccugcuccugugggugcugcuccuguggguccccggcagcacgggggac

SEQ ID NO: 1398 - RNA, 78 nt, Artificial Sequence
  derived and/or modified CDS sequence (opt1) from Nepenthes rafflesiana__ABF74624.1__signal peptide_NrChit1
augaagacccacuacagcuccgccauccugcccauccucacccuguucguguuccugagcaucaacccgucccacggc

SEQ ID NO: 1399 - RNA, 63 nt, Artificial Sequence
  derived and/or modified CDS sequence (opt1) from Conus leopardus__AAS93426.1__signal peptide_ClLp1.3
augggcaugcgcaugauguucaucauguucaugcuggugguccucgccaccaccguggugagc

SEQ ID NO: 1400 - RNA, 72 nt, Artificial Sequence
  derived and/or modified CDS sequence (opt1) from Nepenthes gracilis__AB114914.1__signal peptide_NgNep1
auggccagcucccuguacagcuuccuccuggcccuguccaucguguacaucuucgucgcgcccacccacagc

SEQ ID NO: 1401 - RNA, 57 nt, Artificial Sequence
  derived and/or modified CDS sequence (opt1) from Homo sapiens__NP_001691.1__signal peptide_HsAzu1
augacccgccugaccgugcucgcccugcuggccggccuccuggcgagcucccgggcc

SEQ ID NO: 1402 - RNA, 48 nt, Artificial Sequence
  derived and/or modified CDS sequence (opt1) from Homo sapiens__AAA51948.1__signal peptide_HsCD33
augccccugcuccugcugcucccgcugcugugggccggcgcccucgcg

SEQ ID NO: 1403 - RNA, 57 nt, Artificial Sequence
  derived and/or modified CDS sequence (opt1) from Vibrio cholerae__BAA06291.1__signal peptide_VcCtxB
augaucaagcugaaguucggcguguucuucaccguccuccugagcuccgccuacgcc

SEQ ID NO: 1404 - RNA, 60 nt, Artificial Sequence
  derived and/or modified CDS sequence (opt1) from Homo sapiens__NP_001890.1__signal peptide_HsCST4
auggcccgcccccugugcacccuccugcugcucauggccacccuggcgggcgcccuggcc

SEQ ID NO: 1405 - RNA, 72 nt, Artificial Sequence
  derived and/or modified CDS sequence (opt1) from Homo sapiens__AAA59172.1__signal peptide_HsIns-iso1
auggcccuguggaugcgccuccugccccugcucgcccugcuggcgcucuggggcccggaccccgccgccgcc

SEQ ID NO: 1406 - RNA, 51 nt, Artificial Sequence
  derived and/or modified CDS sequence (opt1) from Homo sapiens__CAA68724.1__signal peptide_HsSPARC
augcgcgccuggaucuucuuccugcucugccuggccggccgggcccuggcc

SEQ ID NO: 1407 - RNA, 51 nt, Artificial Sequence
  derived and/or modified CDS sequence (opt1) from Inluenza A__ACQ45338.1__signal peptide_H1N1(Netherlands2009)-HA
augaaggccauccuggugguccuccuguacaccuucgccaccgcgaacgcc

SEQ ID NO: 1408 - RNA, 90 nt, Artificial Sequence
  derived and/or modified CDS sequence (opt1) from Yellow fever virus__NP_041726.1__signal peptide_YFV
augcggggccugagcucccgcaagcggcgcagccacgacgugcucaccguccaguuccugauccuggggaugcuccugaugaccggcggg

SEQ ID NO: 1409 - RNA, 75 nt, Artificial Sequence
  derived and/or modified CDS sequence (opt1) from Homo sapiens__CAA23783.1__signal peptide_MHCII
auggccaucagcggcgugcccguccugggguucuucaucaucgccgugcucauguccgcgcaggagagcugggcc

SEQ ID NO: 1410 - RNA, 51 nt, Artificial Sequence
  derived and/or modified CDS sequence (opt1) from Vesicular stomatitis Indiana virus__NP_041715.1 __signal peptide_VSIV-G
augaagugccugcucuaccuggccuuccuguucaucggcgugaacugcaag

SEQ ID NO: 1411 - RNA, 51 nt, Artificial Sequence
  derived and/or modified CDS sequence (opt1) from Vesicular stomatitis Indiana virus__NP_041715.1 __signal peptide_VSIV-G(K17A)
augaagugccugcucuaccuggccuuccuguucaucggcgugaacugcgcc

SEQ ID NO: 1412 - RNA, 60 nt, Artificial Sequence
  derived and/or modified CDS sequence (opt1) from Homo sapiens__AAH62704.1__signal peptide_HsIGK@
auggagacccccgcccagcuccuguuccugcugcuccuguggcugccggacaccacgggc

SEQ ID NO: 1413 - RNA, 60 nt, Artificial Sequence
  derived and/or modified CDS sequence (opt1) from Homo sapiens__NP_000575.1__signal peptide_HsCXCL8
augaccagcaagcuggccguggcccuccuggcggccuuccugaucuccgccgcccucugc

SEQ ID NO: 1414 - RNA, 72 nt, Artificial Sequence
  derived and/or modified CDS sequence (opt1) from Homo sapiens__AAA59606.1__signal peptide_HLA-A2-SP
auggccgugauggcgccccgcacccugguccuccugcugagcggcgcccucgcccugacccagacgugggcc

SEQ ID NO: 1415 - RNA, 54 nt, Artificial Sequence
  derived and/or modified CDS sequence (opt1) from Homo sapiens__NP_000468.1__signal peptide_HsALB
augaagugggugaccuucaucagccuccuguuccuguucuccagcgccuacucc

SEQ ID NO: 1416 - RNA, 60 nt, Artificial Sequence
  derived and/or modified CDS sequence (opt1) from Homo sapiens__NP_000577.2__signal peptide_HsIL2
auguaccgcaugcagcugcucagcugcaucgcccugucccuggcccucgugaccaacagc

SEQ ID NO: 1417 - RNA, 51 nt, Artificial Sequence
  derived and/or modified CDS sequence (opt1) from Homo sapiens__CAA68724.1__signal peptide_HsSPARC
augcgcgccuggaucuucuuccugcucugccuggccggccgggcgcuggcc

SEQ ID NO: 1418 - RNA, 90 nt, Artificial Sequence
  derived and/or modified CDS sequence (opt1) from Yellow fever virus__NP_041726.1__signal peptide_YFV
augcgcggccugagcucccggaagcgccggagccacgacgugcucaccguccaguuccugauccuggggaugcuccugaugaccggcggg

SEQ ID NO: 1419 - RNA, 72 nt, Artificial Sequence
  derived and/or modified CDS sequence (opt2) from Homo sapiens__AAA59606.1__signal peptide_HLA-A2-SP
auggccgucauggccccccgcacccucguccuccuccucuccggcgcccucgcccucacccagaccugggcc

SEQ ID NO: 1420 - RNA, 66 nt, Artificial Sequence
  derived and/or modified CDS sequence (opt2) from Homo sapiens__AAA61213.1__signal peptide_HsPLAT
auggacgccaugaagcgcggccucugcugcguccuccuccucugcggcgccgucuucgucuccccc

SEQ ID NO: 1421 - RNA, 81 nt, Artificial Sequence
  derived and/or modified CDS sequence (opt2) from Homo sapiens__NP_000790.2__signal peptide_HsEPO
augggcguccacgagugccccgccuggcucuggcuccuccucucccuccucucccucccccucggccuccccguccucggc

SEQ ID NO: 1422 - RNA, 54 nt, Artificial Sequence
  derived and/or modified CDS sequence (opt2) from Homo sapiens__NP_000468.1__signal peptide_HsALB
augaagugggucaccuucaucucccuccucuuccucuucuccuccgccuacucc

SEQ ID NO: 1423 - RNA, 72 nt, Artificial Sequence
  derived and/or modified CDS sequence (opt2) from Homo sapiens__NP_055022.2__signal peptide_HsCD5
augcccaugggcucccuccagccccucgccacccucuaccuccucggcaugcucgucgccuccugccucggc

SEQ ID NO: 1424 - RNA, 60 nt, Artificial Sequence
  derived and/or modified CDS sequence (opt2) from Homo sapiens__NP_000577.2__signal peptide_HsIL2
auguaccgcaugcagcuccucuccugcaucgcccucucccucgcccucgucaccaacucc

SEQ ID NO: 1425 - RNA, 54 nt, Artificial Sequence
  derived and/or modified CDS sequence (opt2) from Homo sapiens__NP_001020371.3 __signal peptide_HsCTRB2
auggccuuccucuggcuccucuccugcugggcccuccucggcaccaccuucggc

SEQ ID NO: 1426 - RNA, 57 nt, Artificial Sequence
  derived and/or modified CDS sequence (opt2) from Homo sapiens__BAC87457.1__signal peptide_IgG-HC
auggaguucggccucuccugggucuuccucgucgcccucuuccgcggcguccagugc

SEQ ID NO: 1427 - RNA, 57 nt, Artificial Sequence
  derived and/or modified CDS sequence (opt2) from Homo sapiens__AAA52897.1__signal peptide_Ig-HC
auggacuggaccuggcgcgucuucugccuccucgccgucacccccggcgcccacccc

SEQ ID NO: 1428 - RNA, 57 nt, Artificial Sequence
  derived and/or modified CDS sequence (opt2) from Homo sapiens__AAA59018.1__signal peptide_Ig-LC
auggccugguccccccucuuccucacccucaucacccacugcgccggcuccugggcc

SEQ ID NO: 1429 - RNA, 51 nt, Artificial Sequence
  derived and/or modified CDS sequence (opt2) from Gaussia princeps__AAG54095.1__signal peptide_GpLuc
augggcgucaagguccucuucgcccucaucugcaucgccgucgccgaggcc

SEQ ID NO: 1430 - RNA, 63 nt, Artificial Sequence
  derived and/or modified CDS sequence (opt2) from Mus musculus__BAR42292.1__signal peptide_MmIgkappa
auggagaccgacacccuccuccucuggguccuccuccucuggguccccggcuccaccggcgac

SEQ ID NO: 1431 - RNA, 78 nt, Artificial Sequence
  derived and/or modified CDS sequence (opt2) from Nepenthes rafflesiana__ABF74624.1__signal peptide_NrChit1
augaagacccacuacuccuccgccauccuccccauccucacccucuucgucuuccucuccaucaaccccucccacggc

SEQ ID NO: 1432 - RNA, 63 nt, Artificial Sequence
  derived and/or modified CDS sequence (opt2) from Conus leopardus__AAS93426.1__signal peptide_ClLp1.3
augggcaugcgcaugauguucaucauguucaugcucgucguccucgccaccaccgucgucucc

SEQ ID NO: 1433 - RNA, 72 nt, Artificial Sequence
  derived and/or modified CDS sequence (opt2) from Nepenthes gracilis__AB114914.1__signal peptide_NgNep1
auggccuccucccucuacuccuuccuccucgcccucuccaucgucuacaucuucgucgcccccacccacucc

SEQ ID NO: 1434 - RNA, 57 nt, Artificial Sequence
  derived and/or modified CDS sequence (opt2) from Homo sapiens__NP_001691.1__signal peptide_HsAzu1
augacccgccucaccguccucgcccuccucgccggccuccucgccuccucccgcgcc

SEQ ID NO: 1435 - RNA, 48 nt, Artificial Sequence
  derived and/or modified CDS sequence (opt2) from Homo sapiens__AAA51948.1__signal peptide_HsCD33
augccccuccuccuccuccucccccuccucugggccggcgcccucgcc

SEQ ID NO: 1436 - RNA, 57 nt, Artificial Sequence
  derived and/or modified CDS sequence (opt2) from Vibrio cholerae__BAA06291.1__signal peptide_VcCtxB
augaucaagcucaaguucggcgucuucuucaccguccuccucuccuccgccuacgcc

SEQ ID NO: 1437 - RNA, 60 nt, Artificial Sequence
  derived and/or modified CDS sequence (opt2) from Homo sapiens__NP_001890.1__signal peptide_HsCST4
auggcccgcccccucugcacccuccuccuccucauggccacccucgccggcgcccucgcc

SEQ ID NO: 1438 - RNA, 72 nt, Artificial Sequence
  derived and/or modified CDS sequence (opt2) from Homo sapiens__AAA59172.1__signal peptide_HsIns-iso1
auggcccucuggaugcgccuccucccccuccucgcccuccucgcccucuggggccccgaccccgccgccgcc

SEQ ID NO: 1439 - RNA, 51 nt, Artificial Sequence
  derived and/or modified CDS sequence (opt2) from Homo sapiens__CAA68724.1__signal peptide_HsSPARC
augcgcgccuggaucuucuuccuccucugccucgccggccgcgcccucgcc

SEQ ID NO: 1440 - RNA, 51 nt, Artificial Sequence
  derived and/or modified CDS sequence (opt2) from Inluenza A__ACQ45338.1__signal peptide_H1N1(Netherlands2009)-HA
augaaggccauccucgucguccuccucuacaccuucgccaccgccaacgcc

SEQ ID NO: 1441 - RNA, 90 nt, Artificial Sequence
  derived and/or modified CDS sequence (opt2) from Yellow fever virus__NP_041726.1__signal peptide_YFV
augcgcggccucuccucccgcaagcgccgcucccacgacguccucaccguccaguuccucauccucggcaugcuccucaugaccggcggc

SEQ ID NO: 1442 - RNA, 75 nt, Artificial Sequence
  derived and/or modified CDS sequence (opt2) from Homo sapiens__CAA23783.1__signal peptide_MHCII
auggccaucuccggcguccccguccucggcuucuucaucaucgccguccucauguccgcccaggaguccugggcc

SEQ ID NO: 1443 - RNA, 51 nt, Artificial Sequence
  derived and/or modified CDS sequence (opt2) from Vesicular stomatitis Indiana virus__NP_041715.1 __signal peptide_VSIV-G
augaagugccuccucuaccucgccuuccucuucaucggcgucaacugcaag

SEQ ID NO: 1444 - RNA, 51 nt, Artificial Sequence
  derived and/or modified CDS sequence (opt2) from Vesicular stomatitis Indiana virus__NP_041715.1 __signal peptide_VSIV-G(K17A)
augaagugccuccucuaccucgccuuccucuucaucggcgucaacugcgcc

SEQ ID NO: 1445 - RNA, 60 nt, Artificial Sequence
  derived and/or modified CDS sequence (opt2) from Homo sapiens__AAH62704.1__signal peptide_HsIGK@
auggagacccccgcccagcuccucuuccuccuccuccucuggcuccccgacaccaccggc

SEQ ID NO: 1446 - RNA, 60 nt, Artificial Sequence
  derived and/or modified CDS sequence (opt2) from Homo sapiens__NP_000575.1__signal peptide_HsCXCL8
augaccuccaagcucgccgucgcccuccucgccgccuuccucaucuccgccgcccucugc

SEQ ID NO: 1447 - RNA, 72 nt, Artificial Sequence
  derived and/or modified CDS sequence (opt3) from Homo sapiens__AAA59606.1__signal peptide_HLA-A2-SP
auggccgugauggcucccagaacccugguccuccuucugagcggcgcauuggccuuaacacagacuugggcg

SEQ ID NO: 1448 - RNA, 66 nt, Artificial Sequence
  derived and/or modified CDS sequence (opt3) from Homo sapiens__AAA61213.1__signal peptide_HsPLAT
auggacgccaugaagagaggccugugcugugugcuccuucugugcggggcugucuucguuagcccc

SEQ ID NO: 1449 - RNA, 81 nt, Artificial Sequence
  derived and/or modified CDS sequence (opt3) from Homo sapiens__NP_000790.2__signal peptide_HsEPO
augggcgugcacgagugccccgccuggcuguggcuccuucugagcuuguuaucccugccucuagggcucccaguccuggga

SEQ ID NO: 1450 - RNA, 54 nt, Artificial Sequence
  derived and/or modified CDS sequence (opt3) from Homo sapiens__NP_000468.1__signal peptide_HsALB
augaagugggugaccuucaucagccugcucuuucuuuucuccucugccuacuca

SEQ ID NO: 1451 - RNA, 72 nt, Artificial Sequence
  derived and/or modified CDS sequence (opt3) from Homo sapiens__NP_055022.2__signal peptide_HsCD5
augcccaugggcagccugcagccucucgccacccuuuaccuguuggggauguuaguggcuuccugccuggga

SEQ ID NO: 1452 - RNA, 60 nt, Artificial Sequence
  derived and/or modified CDS sequence (opt3) from Homo sapiens__NP_000577.2__signal peptide_HsIL2
auguacagaaugcagcugcucagcugcaucgcccuuucccuggcuuuggugaccaacucu

SEQ ID NO: 1453 - RNA, 54 nt, Artificial Sequence
  derived and/or modified CDS sequence (opt3) from Homo sapiens__NP_001020371.3 __signal peptide_HsCTRB2
auggccuuccuguggcuccuuagcugcugggcucuguugggcaccacauuuggg

SEQ ID NO: 1454 - RNA, 57 nt, Artificial Sequence
  derived and/or modified CDS sequence (opt3) from Homo sapiens__BAC87457.1__signal peptide_IgG-HC
auggaguucggccugagcuggguguuucucgucgcccuuuucagagggguucagugc

SEQ ID NO: 1455 - RNA, 57 nt, Artificial Sequence
  derived and/or modified CDS sequence (opt3) from Homo sapiens__AAA52897.1__signal peptide_Ig-HC
auggacuggaccuggagaguguucugccugcucgccgucacacccggcgcucacccu

SEQ ID NO: 1456 - RNA, 57 nt, Artificial Sequence
  derived and/or modified CDS sequence (opt3) from Homo sapiens__AAA59018.1__signal peptide_Ig-LC
auggccuggagcccccuguuccucacccuuaucacacacugcgcuggcuccugggca

SEQ ID NO: 1457 - RNA, 51 nt, Artificial Sequence
  derived and/or modified CDS sequence (opt3) from Gaussia princeps__AAG54095.1__signal peptide_GpLuc
augggcgugaagguccuguucgcccucaucugcauugcuguugcagaggcc

SEQ ID NO: 1458 - RNA, 63 nt, Artificial Sequence
  derived and/or modified CDS sequence (opt3) from Mus musculus__BAR42292.1__signal peptide_MmIgkappa
auggagaccgacacacugcuccuuugggugcuguuguuauggguccccggcagcacuggggau

SEQ ID NO: 1459 - RNA, 78 nt, Artificial Sequence
  derived and/or modified CDS sequence (opt3) from Nepenthes rafflesiana__ABF74624.1__signal peptide_NrChit1
augaagacccacuacagcuccgccauccugcccauucucacacuuuucguguuucugucuauaaacccuucacauggc

SEQ ID NO: 1460 - RNA, 63 nt, Artificial Sequence
  derived and/or modified CDS sequence (opt3) from Conus leopardus__AAS93426.1__signal peptide_ClLp1.3
augggcaugagaaugauguucaucauguuuaugcuggugguccucgccaccacaguugugagc

SEQ ID NO: 1461 - RNA, 72 nt, Artificial Sequence
  derived and/or modified CDS sequence (opt3) from Nepenthes gracilis__AB114914.1__signal peptide_NgNep1
auggccagcucccuguacucuuuccuccuugcucugucaaucguguauauuuuugucgcacccacccacagu

SEQ ID NO: 1462 - RNA, 57 nt, Artificial Sequence
  derived and/or modified CDS sequence (opt3) from Homo sapiens__NP_001691.1__signal peptide_HsAzu1
augaccagacugacagugcucgcccuucuggcuggcuuguuagcaagcuccagggcc

SEQ ID NO: 1463 - RNA, 48 nt, Artificial Sequence
  derived and/or modified CDS sequence (opt3) from Homo sapiens__AAA51948.1__signal peptide_HsCD33
augccccugcuccuucuguugccuuuacugugggccggcgcucuagca

SEQ ID NO: 1464 - RNA, 57 nt, Artificial Sequence
  derived and/or modified CDS sequence (opt3) from Vibrio cholerae__BAA06291.1__signal peptide_VcCtxB
augaucaagcugaaauucggcguguuuuucaccguccuccuuagcuccgccuacgcu

SEQ ID NO: 1465 - RNA, 60 nt, Artificial Sequence
  derived and/or modified CDS sequence (opt3) from Homo sapiens__NP_001890.1__signal peptide_HsCST4
auggccagaccccugugcacccuccuucuguugauggcuacauuagcaggcgcccuggcg

SEQ ID NO: 1466 - RNA, 72 nt, Artificial Sequence
  derived and/or modified CDS sequence (opt3) from Homo sapiens__AAA59172.1__signal peptide_HsIns-iso1
auggcccuguggaugagacuccuuccccuguuggcuuuacuggcacuauggggcccugacccagccgcggcu

SEQ ID NO: 1467 - RNA, 51 nt, Artificial Sequence
  derived and/or modified CDS sequence (opt3) from Homo sapiens__CAA68724.1__signal peptide_HsSPARC
augagagccuggaucuucuuucugcucugccuugcuggcagggcacuggcc

SEQ ID NO: 1468 - RNA, 51 nt, Artificial Sequence
  derived and/or modified CDS sequence (opt3) from Inluenza A__ACQ45338.1__signal peptide_H1N1(Netherlands2009)-HA
augaaggccauccuggugguccuccuuuacaccuucgcuacagcaaacgcc

SEQ ID NO: 1469 - RNA, 90 nt, Artificial Sequence
  derived and/or modified CDS sequence (opt3) from Yellow fever virus__NP_041726.1__signal peptide_YFV
augagaggccugagcuccaggaagcggcgcucucacgacgugcucaccguccaguuccuuauccuggggauguuguuaaugacaggaggu

SEQ ID NO: 1470 - RNA, 75 nt, Artificial Sequence
  derived and/or modified CDS sequence (opt3) from Homo sapiens__CAA23783.1__signal peptide_MHCII
auggccaucagcggcgugcccguccugggguucuuuauuauagcuguucucauguccgcacaggagucuugggcc

SEQ ID NO: 1471 - RNA, 51 nt, Artificial Sequence
  derived and/or modified CDS sequence (opt3) from Vesicular stomatitis Indiana virus__NP_041715.1 __signal peptide_VSIV-G
augaagugccugcucuaccuugccuuccuguuuaucggcgugaacuguaaa

SEQ ID NO: 1472 - RNA, 51 nt, Artificial Sequence
  derived and/or modified CDS sequence (opt3) from Vesicular stomatitis Indiana virus__NP_041715.1 __signal peptide_VSIV-G(K17A)
augaagugccugcucuaccuugccuuccuguuuaucggcgugaacugugcu

SEQ ID NO: 1473 - RNA, 60 nt, Artificial Sequence
  derived and/or modified CDS sequence (opt3) from Homo sapiens__AAH62704.1__signal peptide_HsIGK@
auggagacccccgcccagcuccuguuccuucuguuguuauggcugccugacacaacuggc

SEQ ID NO: 1474 - RNA, 60 nt, Artificial Sequence
  derived and/or modified CDS sequence (opt3) from Homo sapiens__NP_000575.1__signal peptide_HsCXCL8
augaccagcaagcuggccguggcucuccuugcagccuuccugaucuccgcggcuuugugc

SEQ ID NO: 1475 - RNA, 72 nt, Artificial Sequence
  derived and/or modified CDS sequence (opt4) from Homo sapiens__AAA59606.1__signal peptide_HLA-A2-SP
auggccgugauggcccccagaacccuggugcugcugcugagcggcgcccuggcccugacccagaccugggcc

SEQ ID NO: 1476 - RNA, 66 nt, Artificial Sequence
  derived and/or modified CDS sequence (opt4) from Homo sapiens__AAA61213.1__signal peptide_HsPLAT
auggacgccaugaagagaggccugugcugcgugcugcugcugugcggcgccguguucgugagcccc

SEQ ID NO: 1477 - RNA, 81 nt, Artificial Sequence
  derived and/or modified CDS sequence (opt4) from Homo sapiens__NP_000790.2__signal peptide_HsEPO
augggcgugcacgagugccccgccuggcuguggcugcugcugagccugcugagccugccccugggccugcccgugcugggc

SEQ ID NO: 1478 - RNA, 54 nt, Artificial Sequence
  derived and/or modified CDS sequence (opt4) from Homo sapiens__NP_000468.1__signal peptide_HsALB
augaagugggugaccuucaucagccugcuguuccuguucagcagcgccuacagc

SEQ ID NO: 1479 - RNA, 72 nt, Artificial Sequence
  derived and/or modified CDS sequence (opt4) from Homo sapiens__NP_055022.2__signal peptide_HsCD5
augcccaugggcagccugcagccccuggccacccuguaccugcugggcaugcugguggccagcugccugggc

SEQ ID NO: 1480 - RNA, 60 nt, Artificial Sequence
  derived and/or modified CDS sequence (opt4) from Homo sapiens__NP_000577.2__signal peptide_HsIL2
auguacagaaugcagcugcugagcugcaucgcccugagccuggcccuggugaccaacagc

SEQ ID NO: 1481 - RNA, 54 nt, Artificial Sequence
  derived and/or modified CDS sequence (opt4) from Homo sapiens__NP_001020371.3 __signal peptide_HsCTRB2
auggccuuccuguggcugcugagcugcugggcccugcugggcaccaccuucggc

SEQ ID NO: 1482 - RNA, 57 nt, Artificial Sequence
  derived and/or modified CDS sequence (opt4) from Homo sapiens__BAC87457.1__signal peptide_IgG-HC
auggaguucggccugagcuggguguuccugguggcccuguucagaggcgugcagugc

SEQ ID NO: 1483 - RNA, 57 nt, Artificial Sequence
  derived and/or modified CDS sequence (opt4) from Homo sapiens__AAA52897.1__signal peptide_Ig-HC
auggacuggaccuggagaguguucugccugcuggccgugacccccggcgcccacccc

SEQ ID NO: 1484 - RNA, 57 nt, Artificial Sequence
  derived and/or modified CDS sequence (opt4) from Homo sapiens__AAA59018.1__signal peptide_Ig-LC
auggccuggagcccccuguuccugacccugaucacccacugcgccggcagcugggcc

SEQ ID NO: 1485 - RNA, 51 nt, Artificial Sequence
  derived and/or modified CDS sequence (opt4) from Gaussia princeps__AAG54095.1__signal peptide_GpLuc
augggcgugaaggugcuguucgcccugaucugcaucgccguggccgaggcc

SEQ ID NO: 1486 - RNA, 63 nt, Artificial Sequence
  derived and/or modified CDS sequence (opt4) from Mus musculus__BAR42292.1__signal peptide_MmIgkappa
auggagaccgacacccugcugcugugggugcugcugcugugggugcccggcagcaccggcgac

SEQ ID NO: 1487 - RNA, 78 nt, Artificial Sequence
  derived and/or modified CDS sequence (opt4) from Nepenthes rafflesiana__ABF74624.1__signal peptide_NrChit1
augaagacccacuacagcagcgccauccugcccauccugacccuguucguguuccugagcaucaaccccagccacggc

SEQ ID NO: 1488 - RNA, 63 nt, Artificial Sequence
  derived and/or modified CDS sequence (opt4) from Conus leopardus__AAS93426.1__signal peptide_ClLp1.3
augggcaugagaaugauguucaucauguucaugcugguggugcuggccaccaccguggugagc

SEQ ID NO: 1489 - RNA, 72 nt, Artificial Sequence
  derived and/or modified CDS sequence (opt4) from Nepenthes gracilis__AB114914.1__signal peptide_NgNep1
auggccagcagccuguacagcuuccugcuggcccugagcaucguguacaucuucguggcccccacccacagc

SEQ ID NO: 1490 - RNA, 57 nt, Artificial Sequence
  derived and/or modified CDS sequence (opt4) from Homo sapiens__NP_001691.1__signal peptide_HsAzu1
augaccagacugaccgugcuggcccugcuggccggccugcuggccagcagcagagcc

SEQ ID NO: 1491 - RNA, 48 nt, Artificial Sequence
  derived and/or modified CDS sequence (opt4) from Homo sapiens__AAA51948.1__signal peptide_HsCD33
augccccugcugcugcugcugccccugcugugggccggcgcccuggcc

SEQ ID NO: 1492 - RNA, 57 nt, Artificial Sequence
  derived and/or modified CDS sequence (opt4) from Vibrio cholerae__BAA06291.1__signal peptide_VcCtxB
augaucaagcugaaguucggcguguucuucaccgugcugcugagcagcgccuacgcc

SEQ ID NO: 1493 - RNA, 60 nt, Artificial Sequence
  derived and/or modified CDS sequence (opt4) from Homo sapiens__NP_001890.1__signal peptide_HsCST4
auggccagaccccugugcacccugcugcugcugauggccacccuggccggcgcccuggcc

SEQ ID NO: 1494 - RNA, 72 nt, Artificial Sequence
  derived and/or modified CDS sequence (opt4) from Homo sapiens__AAA59172.1__signal peptide_HsIns-iso1
auggcccuguggaugagacugcugccccugcuggcccugcuggcccuguggggccccgaccccgccgccgcc

SEQ ID NO: 1495 - RNA, 51 nt, Artificial Sequence
  derived and/or modified CDS sequence (opt4) from Homo sapiens__CAA68724.1__signal peptide_HsSPARC
augagagccuggaucuucuuccugcugugccuggccggcagagcccuggcc

SEQ ID NO: 1496 - RNA, 51 nt, Artificial Sequence
  derived and/or modified CDS sequence (opt4) from Inluenza A__ACQ45338.1__signal peptide_H1N1(Netherlands2009)-HA
augaaggccauccugguggugcugcuguacaccuucgccaccgccaacgcc

SEQ ID NO: 1497 - RNA, 90 nt, Artificial Sequence
  derived and/or modified CDS sequence (opt4) from Yellow fever virus__NP_041726.1__signal peptide_YFV
augagaggccugagcagcagaaagagaagaagccacgacgugcugaccgugcaguuccugauccugggcaugcugcugaugaccggcggc

SEQ ID NO: 1498 - RNA, 75 nt, Artificial Sequence
  derived and/or modified CDS sequence (opt4) from Homo sapiens__CAA23783.1__signal peptide_MHCII
auggccaucagcggcgugcccgugcugggcuucuucaucaucgccgugcugaugagcgcccaggagagcugggcc

SEQ ID NO: 1499 - RNA, 51 nt, Artificial Sequence
  derived and/or modified CDS sequence (opt4) from Vesicular stomatitis Indiana virus__NP_041715.1 __signal peptide_VSIV-G
augaagugccugcuguaccuggccuuccuguucaucggcgugaacugcaag

SEQ ID NO: 1500 - RNA, 51 nt, Artificial Sequence
  derived and/or modified CDS sequence (opt4) from Vesicular stomatitis Indiana virus__NP_041715.1 __signal peptide_VSIV-G(K17A)
augaagugccugcuguaccuggccuuccuguucaucggcgugaacugcgcc

SEQ ID NO: 1501 - RNA, 60 nt, Artificial Sequence
  derived and/or modified CDS sequence (opt4) from Homo sapiens__AAH62704.1__signal peptide_HsIGK@
auggagacccccgcccagcugcuguuccugcugcugcuguggcugcccgacaccaccggc

SEQ ID NO: 1502 - RNA, 60 nt, Artificial Sequence
  derived and/or modified CDS sequence (opt4) from Homo sapiens__NP_000575.1__signal peptide_HsCXCL8
augaccagcaagcuggccguggcccugcuggccgccuuccugaucagcgccgcccugugc

SEQ ID NO: 1503 - RNA, 72 nt, Artificial Sequence
  derived and/or modified CDS sequence (opt5) from Homo sapiens__AAA59606.1__signal peptide_HLA-A2-SP
auggccgugauggcucccagaacccugguccuccugcuuagcggcgcccuggcgcucacacagacgugggcu

SEQ ID NO: 1504 - RNA, 66 nt, Artificial Sequence
  derived and/or modified CDS sequence (opt5) from Homo sapiens__AAA61213.1__signal peptide_HsPLAT
auggacgccaugaagagaggccugugcugugugcuccugcuuugcggggcugucuucguuagcccc

SEQ ID NO: 1505 - RNA, 81 nt, Artificial Sequence
  derived and/or modified CDS sequence (opt5) from Homo sapiens__NP_000790.2__signal peptide_HsEPO
augggcgugcacgagugccccgccuggcuguggcuccugcuuagccugcucucccugccucuugggcugccgguccucgga

SEQ ID NO: 1506 - RNA, 54 nt, Artificial Sequence
  derived and/or modified CDS sequence (opt5) from Homo sapiens__NP_000468.1__signal peptide_HsALB
augaagugggugaccuucaucagccugcucuuucuguucuccucugccuacagc

SEQ ID NO: 1507 - RNA, 72 nt, Artificial Sequence
  derived and/or modified CDS sequence (opt5) from Homo sapiens__NP_055022.2__signal peptide_HsCD5
augcccaugggcagccugcagccucucgccacccuguaccuucuggggaugcucguggcuuccugccuggga

SEQ ID NO: 1508 - RNA, 60 nt, Artificial Sequence
  derived and/or modified CDS sequence (opt5) from Homo sapiens__NP_000577.2__signal peptide_HsIL2
auguacagaaugcagcugcucagcugcaucgcccugucccuugcucuggugaccaacucu

SEQ ID NO: 1509 - RNA, 54 nt, Artificial Sequence
  derived and/or modified CDS sequence (opt5) from Homo sapiens__NP_001020371.3 __signal peptide_HsCTRB2
auggcuuuccuguggcuccugagcugcugggcccuucugggcaccacauuuggg

SEQ ID NO: 1510 - RNA, 57 nt, Artificial Sequence
  derived and/or modified CDS sequence (opt5) from Homo sapiens__BAC87457.1__signal peptide_IgG-HC
auggaguucggccugagcuggguguuucucgucgcccuguucagagggguucagugc

SEQ ID NO: 1511 - RNA, 57 nt, Artificial Sequence; identical to SEQ ID NO: 1455
  derived and/or modified CDS sequence (opt5) from Homo sapiens__AAA52897.1__signal peptide_Ig-HC

SEQ ID NO: 1512 - RNA, 57 nt, Artificial Sequence
  derived and/or modified CDS sequence (opt5) from Homo sapiens__AAA59018.1__signal peptide_Ig-LC
auggccuggagcccccuguuccucacccugaucacacacugcgcuggcuccugggcc

SEQ ID NO: 1513 - RNA, 51 nt, Artificial Sequence
  derived and/or modified CDS sequence (opt5) from Gaussia princeps__AAG54095.1__signal peptide_GpLuc
augggcgugaagguccuguucgcccucaucugcauugcuguugccgaggcg

SEQ ID NO: 1514 - RNA, 63 nt, Artificial Sequence
  derived and/or modified CDS sequence (opt5) from Mus musculus__BAR42292.1__signal peptide_MmIgkappa
auggagaccgacacacugcuccugugggugcuucugcucuggguccccggcagcacgggggau

SEQ ID NO: 1515 - RNA, 78 nt, Artificial Sequence
  derived and/or modified CDS sequence (opt5) from Nepenthes rafflesiana__ABF74624.1__signal peptide_NrChit1
augaagacccacuacagcuccgccauccugcccauucucacacuguucguguuucuuucuaucaacccuagccauggc

SEQ ID NO: 1516 - RNA, 63 nt, Artificial Sequence; identical to SEQ ID NO: 1460
  derived and/or modified CDS sequence (opt5) from Conus leopardus__AAS93426.1__signal peptide_ClLp1.3

SEQ ID NO: 1517 - RNA, 72 nt, Artificial Sequence
  derived and/or modified CDS sequence (opt5) from Nepenthes gracilis__AB114914.1__signal peptide_NgNep1
auggccagcucccuguacucuuuccuccuggcucuuagcaucguguauauuuuugucgcccccacccacucc

SEQ ID NO: 1518 - RNA, 57 nt, Artificial Sequence
  derived and/or modified CDS sequence (opt5) from Homo sapiens__NP_001691.1__signal peptide_HsAzu1
augaccagacugacagugcucgcccugcuugcuggccugcucgccagcucccgggcg

SEQ ID NO: 1519 - RNA, 48 nt, Artificial Sequence
  derived and/or modified CDS sequence (opt5) from Homo sapiens__AAA51948.1__signal peptide_HsCD33
augccccugcuccugcuucugccucuccugugggccggcgcucuugcc

SEQ ID NO: 1520 - RNA, 57 nt, Artificial Sequence
  derived and/or modified CDS sequence (opt5) from Vibrio cholerae__BAA06291.1__signal peptide_VcCtxB
augaucaagcugaaauucggcguguuuuucaccguccuccugagcuccgccuacgcu

SEQ ID NO: 1521 - RNA, 60 nt, Artificial Sequence
  derived and/or modified CDS sequence (opt5) from Homo sapiens__NP_001890.1__signal peptide_HsCST4
auggccagaccccugugcacccuccugcuucugauggcuacacucgccggcgcgcuggcu

SEQ ID NO: 1522 - RNA, 72 nt, Artificial Sequence
  derived and/or modified CDS sequence (opt5) from Homo sapiens__AAA59172.1__signal peptide_HsIns-iso1
auggcccuguggaugagacuccugccccuucuggcucuccuggcccuuuggggcccugacccggcggcugcc

SEQ ID NO: 1523 - RNA, 51 nt, Artificial Sequence
  derived and/or modified CDS sequence (opt5) from Homo sapiens__CAA68724.1__signal peptide_HsSPARC
augagagccuggaucuucuuucugcucugccuggcuggccgggcccuugcg

SEQ ID NO: 1524 - RNA, 51 nt, Artificial Sequence
  derived and/or modified CDS sequence (opt5) from Inluenza A__ACQ45338.1__signal peptide_H1N1(Netherlands2009)-HA
augaaggccauccuggugguccuccuguacaccuucgcuacagccaacgcg

SEQ ID NO: 1525 - RNA, 90 nt, Artificial Sequence
  derived and/or modified CDS sequence (opt5) from Yellow fever virus__NP_041726.1__signal peptide_YFV
augagaggccugagcucccggaagcgcagaucucacgacgugcucaccguccaguuccugauccuugggaugcugcucaugacaggaggc

SEQ ID NO: 1526 - RNA, 75 nt, Artificial Sequence
  derived and/or modified CDS sequence (opt5) from Homo sapiens__CAA23783.1__signal peptide_MHCII
auggccaucagcggcgugcccguccugggguucuuuauuaucgcuguucucauguccgcccaggagucuugggcg

SEQ ID NO: 1527 - RNA, 51 nt, Artificial Sequence
  derived and/or modified CDS sequence (opt5) from Vesicular stomatitis Indiana virus__NP_041715.1 __signal peptide_VSIV-G
augaagugccugcucuaccuggccuuccuuuuuaucggcgugaacuguaaa

SEQ ID NO: 1528 - RNA, 51 nt, Artificial Sequence
  derived and/or modified CDS sequence (opt5) from Vesicular stomatitis Indiana virus__NP_041715.1 __signal peptide_VSIV-G(K17A)
augaagugccugcucuaccuggccuuccuuuuuaucggcgugaacugugcu

SEQ ID NO: 1529 - RNA, 60 nt, Artificial Sequence
  derived and/or modified CDS sequence (opt5) from Homo sapiens__AAH62704.1__signal peptide_HsIGK@
auggagacccccgcccagcuccuguuccugcuucugcucuggcugccugacacaacgggc

SEQ ID NO: 1530 - RNA, 60 nt, Artificial Sequence
  derived and/or modified CDS sequence (opt5) from Homo sapiens__NP_000575.1__signal peptide_HsCXCL8
augaccagcaagcuggccguggcucuccuggccgcguuccuuaucuccgcugcccugugc

SEQ ID NO: 1531 - RNA, 72 nt, Artificial Sequence
  derived and/or modified CDS sequence (opt6) from Homo sapiens__AAA59606.1__signal peptide_HLA-A2-SP
auggcaguaauggcaccaagaacauuaguacuacuacuaucaggagcacuagcacuaacacaaacaugggca

SEQ ID NO: 1532 - RNA, 66 nt, Artificial Sequence
  derived and/or modified CDS sequence (opt6) from Homo sapiens__AAA61213.1__signal peptide_HsPLAT
auggaugcaaugaaaagaggauuauguuguguauuauuauuauguggagcaguauuuguaagucca

SEQ ID NO: 1533 - RNA, 81 nt, Artificial Sequence
  derived and/or modified CDS sequence (opt6) from Homo sapiens__NP_000790.2__signal peptide_HsEPO
auggguguacaugaauguccagcuuggcuuuggcuuuuacuuucacuuuuaucuuuaccuuuagguuuaccuguacuugga

SEQ ID NO: 1534 - RNA, 54 nt, Artificial Sequence
  derived and/or modified CDS sequence (opt6) from Homo sapiens__NP_000468.1__signal peptide_HsALB
augaaauggguuacuuuuauuucucuucuuuuucuuuuuucuucugcuuacucu

SEQ ID NO: 1535 - RNA, 72 nt, Artificial Sequence
  derived and/or modified CDS sequence (opt6) from Homo sapiens__NP_055022.2__signal peptide_HsCD5
augccuauggguucacuucaaccuuuagcuacacuuuaucuuuuagguaugcuuguagcuucauguuuaggu

SEQ ID NO: 1536 - RNA, 60 nt, Artificial Sequence
  derived and/or modified CDS sequence (opt6) from Homo sapiens__NP_000577.2__signal peptide_HsIL2
auguaccguaugcaacuacuuucauguauagcucuaucucuagcucuaguuacaaauuca

SEQ ID NO: 1537 - RNA, 54 nt, Artificial Sequence
  derived and/or modified CDS sequence (opt6) from Homo sapiens__NP_001020371.3 __signal peptide_HsCTRB2
auggcuuuuuuaugguuauuaucuuguugggcuuuauuagguacuacuuuuggu

SEQ ID NO: 1538 - RNA, 57 nt, Artificial Sequence
  derived and/or modified CDS sequence (opt6) from Homo sapiens__BAC87457.1__signal peptide_IgG-HC
auggaauuugguuuaucuuggguuuuuuuaguugcuuuauuuagagguguucagugu

SEQ ID NO: 1539 - RNA, 57 nt, Artificial Sequence
  derived and/or modified CDS sequence (opt6) from Homo sapiens__AAA52897.1__signal peptide_Ig-HC
auggauuggacuuggcguguauuuuguuuauuagcuguaacuccaggugcacaucca

SEQ ID NO: 1540 - RNA, 57 nt, Artificial Sequence
  derived and/or modified CDS sequence (opt6) from Homo sapiens__AAA59018.1__signal peptide_Ig-LC
auggccuggaguccauuauuuuuaacauuaauaacucauugugcaggcucaugggca

SEQ ID NO: 1541 - RNA, 51 nt, Artificial Sequence
  derived and/or modified CDS sequence (opt6) from Gaussia princeps__AAG54095.1__signal peptide_GpLuc
augggaguaaaaguacuauuugcauuaauauguauagcaguagcagaagca

SEQ ID NO: 1542 - RNA, 63 nt, Artificial Sequence
  derived and/or modified CDS sequence (opt6) from Mus musculus__BAR42292.1__signal peptide_MmIgkappa
auggaaacagauacauuauuauuauggguuuuauuauuauggguaccuggaaguacaggugac

SEQ ID NO: 1543 - RNA, 78 nt, Artificial Sequence
  derived and/or modified CDS sequence (opt6) from Nepenthes rafflesiana__ABF74624.1__signal peptide_NrChit1
augaaaacacacuacuccucagccauacucccaauccuaacccuauucguauuccuauccauaaacccaucccacggc

SEQ ID NO: 1544 - RNA, 63 nt, Artificial Sequence
  derived and/or modified CDS sequence (opt6) from Conus leopardus__AAS93426.1__signal peptide_ClLp1.3
augggaaugagaaugauguuuauaauguucaugcuaguaguauuagcaacaacaguaguauca

SEQ ID NO: 1545 - RNA, 72 nt, Artificial Sequence
  derived and/or modified CDS sequence (opt6) from Nepenthes gracilis__AB114914.1__signal peptide_NgNep1
auggccucaucucuauauucauuucuacuugcacuuucaauuguauauauauuuguagccccaacucacucu

SEQ ID NO: 1546 - RNA, 57 nt, Artificial Sequence
  derived and/or modified CDS sequence (opt6) from Homo sapiens__NP_001691.1__signal peptide_HsAzu1
augacaagacuaacaguauuagcauuacuagcaggauuacuagcaagcucaagagca

SEQ ID NO: 1547 - RNA, 48 nt, Artificial Sequence
  derived and/or modified CDS sequence (opt6) from Homo sapiens__AAA51948.1__signal peptide_HsCD33
augccuuuauuauuauuauuaccuuuacuuugggcuggcgcuuuagcu

SEQ ID NO: 1548 - RNA, 57 nt, Artificial Sequence
  derived and/or modified CDS sequence (opt6) from Vibrio cholerae__BAA06291.1__signal peptide_VcCtxB
augauuaagcuuaaguuugggguuuuuuuuacgguuuugcuuucgagugcguaugcg

SEQ ID NO: 1549 - RNA, 60 nt, Artificial Sequence
  derived and/or modified CDS sequence (opt6) from Homo sapiens__NP_001890.1__signal peptide_HsCST4
auggcuagaccucuauguacauuacuauuacuaauggcaacucuagcuggagcucuagcu

SEQ ID NO: 1550 - RNA, 72 nt, Artificial Sequence
  derived and/or modified CDS sequence (opt6) from Homo sapiens__AAA59172.1__signal peptide_HsIns-iso1
auggcauuauggaugagauuauuaccauuauuagcauuauuagcauuauggggaccagauccagcagcagca

SEQ ID NO: 1551 - RNA, 51 nt, Artificial Sequence
  derived and/or modified CDS sequence (opt6) from Homo sapiens__CAA68724.1__signal peptide_HsSPARC
augcgugcauggauauuuuuucuuuuauguuuggcuggacgugcacuugca

SEQ ID NO: 1552 - RNA, 51 nt, Artificial Sequence
  derived and/or modified CDS sequence (opt6) from Inluenza A__ACQ45338.1__signal peptide_H1N1(Netherlands2009)-HA
augaaagcaaucuuagucguacucuuauacacauucgcgaccgcaaacgca

SEQ ID NO: 1553 - RNA, 90 nt, Artificial Sequence
  derived and/or modified CDS sequence (opt6) from Yellow fever virus__NP_041726.1__signal peptide_YFV
augagaggauuaaguagcagaaaaagaagaagucaugauguauuaacaguacaauuuuuaauauuaggaauguuauuaaugacaggagga

SEQ ID NO: 1554 - RNA, 75 nt, Artificial Sequence
  derived and/or modified CDS sequence (opt6) from Homo sapiens__CAA23783.1__signal peptide_MHCII
auggcaauuucagguguaccuguacuuggauuuuuuauuauagcuguauuaaugagugcacaagaaaguugggcc

SEQ ID NO: 1555 - RNA, 51 nt, Artificial Sequence
  derived and/or modified CDS sequence (opt6) from Vesicular stomatitis Indiana virus__NP_041715.1 __signal peptide_VSIV-G
augaaaugcuuacuauauuuagccuucuuauucauuggcguuaacuguaaa

SEQ ID NO: 1556 - RNA, 51 nt, Artificial Sequence
  derived and/or modified CDS sequence (opt6) from Vesicular stomatitis Indiana virus__NP_041715.1 __signal peptide_VSIV-G(K17A)
augaaaugucuucuuuaucuugccuuuuuauuuauugguguuaauugugcu

SEQ ID NO: 1557 - RNA, 60 nt, Artificial Sequence; identical to SEQ ID NO: 1529
  derived and/or modified CDS sequence (opt6) from Homo sapiens__AAH62704.1__signal peptide_HsIGK@

SEQ ID NO: 1558 - RNA, 60 nt, Artificial Sequence
  derived and/or modified CDS sequence (opt6) from Homo sapiens__NP_000575.1__signal peptide_HsCXCL8
augacuucaaaauuagcuguagcuuuacuugcagcuuuucuuauaucugcagcuuuaugu

SEQ ID NO: 1559 - RNA, 72 nt, Artificial Sequence
  derived and/or modified CDS sequence (opt11) from Homo sapiens__AAA59606.1__signal peptide_HLA-A2-SP
auggccgucauggccccccgcacccucguccuccuccucuccggcgcccucgcccucacccaaaccugggcc

SEQ ID NO: 1560 - RNA, 66 nt, Artificial Sequence
  derived and/or modified CDS sequence (opt11) from Homo sapiens__AAA61213.1__signal peptide_HsPLAT
auggaugcgaugaagaggggguuguguuguguguuguuguuguguggggcgguguuugugaguccg

SEQ ID NO: 1561 - RNA, 81 nt, Artificial Sequence
  derived and/or modified CDS sequence (opt11) from Homo sapiens__NP_000790.2__signal peptide_HsEPO
augggcgugcacgagugcccggccuggcucuggcucuugcucucgcucuugagcuugcccuugggcuugcccgugcucggg

SEQ ID NO: 1562 - RNA, 54 nt, Artificial Sequence
  derived and/or modified CDS sequence (opt11) from Homo sapiens__NP_000468.1__signal peptide_HsALB
augaaaugggucaccuucaucucccuccucuuccucuucuccuccgccuacucc

SEQ ID NO: 1563 - RNA, 72 nt, Artificial Sequence
  derived and/or modified CDS sequence (opt11) from Homo sapiens__NP_055022.2__signal peptide_HsCD5
augcccaugggcucccuccaaccccucgccacccucuaccuccucggcaugcucgucgccuccugccucggc

SEQ ID NO: 1564 - RNA, 60 nt, Artificial Sequence
  derived and/or modified CDS sequence (opt11) from Homo sapiens__NP_000577.2__signal peptide_HsIL2
auguaccgcaugcaacuccucuccugcaucgcccucucccucgcccucgucaccaacucc

SEQ ID NO: 1565 - RNA, 54 nt, Artificial Sequence; identical to SEQ ID NO: 1425
  derived and/or modified CDS sequence (opt11) from Homo sapiens__NP_001020371.3 __signal peptide_HsCTRB2

SEQ ID NO: 1566 - RNA, 57 nt, Artificial Sequence
  derived and/or modified CDS sequence (opt11) from Homo sapiens__BAC87457.1__signal peptide_IgG-HC
auggaguucgggcucucguggguguucuuggucgcgcucuuucgcgggguccagugc

SEQ ID NO: 1567 - RNA, 57 nt, Artificial Sequence
  derived and/or modified CDS sequence (opt11) from Homo sapiens__AAA52897.1__signal peptide_Ig-HC
auggacuggaccuggcgcguguucugucucuuggccgugaccccgggcgcgcacccg

SEQ ID NO: 1568 - RNA, 57 nt, Artificial Sequence
  derived and/or modified CDS sequence (opt11) from Homo sapiens__AAA59018.1__signal peptide_Ig-LC
auggccugguccccacucuuccucacacucaucacccacugcgccggcuccugggcc

SEQ ID NO: 1569 - RNA, 51 nt, Artificial Sequence
  derived and/or modified CDS sequence (opt11) from Gaussia princeps__AAG54095.1__signal peptide_GpLuc
augggcgugaaagugcucuuugccuugaucuguaucgcggucgcggaagcg

SEQ ID NO: 1570 - RNA, 63 nt, Artificial Sequence
  derived and/or modified CDS sequence (opt11) from Mus musculus__BAR42292.1__signal peptide_MmIgkappa
auggaaaccgacacacuccuacucuggguccuccuccucuggguccccggcuccaccggcgac

SEQ ID NO: 1571 - RNA, 78 nt, Artificial Sequence
  derived and/or modified CDS sequence (opt11) from Nepenthes rafflesiana__ABF74624.1__signal peptide_NrChit1
augaaaacccacuacuccuccgccauccuccccauccucacccucuucgucuuccucuccaucaaccccucccacggc

SEQ ID NO: 1572 - RNA, 63 nt, Artificial Sequence
  derived and/or modified CDS sequence (opt11) from Conus leopardus__AAS93426.1__signal peptide_ClLp1.3
augggcaugcgcaugauguuuaucauguucaugcucguggucuuggccacgaccguggucucg

SEQ ID NO: 1573 - RNA, 72 nt, Artificial Sequence; identical to SEQ ID NO: 1433
  derived and/or modified CDS sequence (opt11) from Nepenthes gracilis__AB114914.1__signal peptide_NgNep1

SEQ ID NO: 1574 - RNA, 57 nt, Artificial Sequence
  derived and/or modified CDS sequence (opt11) from Homo sapiens__NP_001691.1__signal peptide_HsAzu1
augacccgccucacaguccucgcccuacucgccggccuccucgccuccucccgcgcc

SEQ ID NO: 1575 - RNA, 48 nt, Artificial Sequence; identical to SEQ ID NO: 1435
  derived and/or modified CDS sequence (opt11) from Homo sapiens__AAA51948.1__signal peptide_HsCD33

SEQ ID NO: 1576 - RNA, 57 nt, Artificial Sequence
  derived and/or modified CDS sequence (opt11) from Vibrio cholerae__BAA06291.1__signal peptide_VcCtxB
augaucaaacucaaauucggcgucuucuucaccguccuccucuccuccgccuacgcc

SEQ ID NO: 1577 - RNA, 60 nt, Artificial Sequence
  derived and/or modified CDS sequence (opt11) from Homo sapiens__NP_001890.1__signal peptide_HsCST4
auggcccgcccacucugcacccuacuccuccucauggccacccucgccggcgcccucgcc

SEQ ID NO: 1578 - RNA, 72 nt, Artificial Sequence
  derived and/or modified CDS sequence (opt11) from Homo sapiens__AAA59172.1__signal peptide_HsIns-iso1
auggcccucuggaugcgccuacucccccuccucgcccuacucgcccucuggggccccgaccccgccgccgcc

SEQ ID NO: 1579 - RNA, 51 nt, Artificial Sequence
  derived and/or modified CDS sequence (opt11) from Homo sapiens__CAA68724.1__signal peptide_HsSPARC
augcgcgcguggauauucuuucucuugugcuuggccgggcgcgcgcucgcg

SEQ ID NO: 1580 - RNA, 51 nt, Artificial Sequence
  derived and/or modified CDS sequence (opt11) from Inluenza A__ACQ45338.1__signal peptide_H1N1(Netherlands2009)-HA
augaaagcgaucuuggucgugcucuuguacacguucgcgaccgcgaacgcg

SEQ ID NO: 1581 - RNA, 90 nt, Artificial Sequence
  derived and/or modified CDS sequence (opt11) from Yellow fever virus__NP_041726.1__signal peptide_YFV
augaggggcuugagcucgcgcaagcgcaggagccaugacgugcucacgguccaguucuugauccugggcaugcucuugaugacgggcggg

SEQ ID NO: 1582 - RNA, 75 nt, Artificial Sequence
  derived and/or modified CDS sequence (opt11) from Homo sapiens__CAA23783.1__signal peptide_MHCII
auggcgaucucgggcgugcccgugcucggguucuuuaucauagccgugcucaugagcgcgcaagagagcugggcc

SEQ ID NO: 1583 - RNA, 51 nt, Artificial Sequence
  derived and/or modified CDS sequence (opt11) from Vesicular stomatitis Indiana virus__NP_041715.1 __signal peptide_VSIV-G
augaaaugccuccucuaccucgccuuccucuucaucggcgucaacugcaaa

SEQ ID NO: 1584 - RNA, 51 nt, Artificial Sequence
  derived and/or modified CDS sequence (opt11) from Vesicular stomatitis Indiana virus__NP_041715.1 __signal peptide_VSIV-G(K17A)
augaaaugccuccucuaccucgccuuccucuucaucggcgucaacugcgcc

SEQ ID NO: 1585 - RNA, 60 nt, Artificial Sequence
  derived and/or modified CDS sequence (opt11) from Homo sapiens__AAH62704.1__signal peptide_HsIGK@
auggaaacccccgcccaacuccucuuccuccuccuccucuggcuccccgacaccaccggc

SEQ ID NO: 1586 - RNA, 60 nt, Artificial Sequence
  derived and/or modified CDS sequence (opt11) from Homo sapiens__NP_000575.1__signal peptide_HsCXCL8
augaccuccaaacucgccgucgcccuccucgccgccuuccucaucuccgccgcccucugc

SEQ ID NO: 1587 - protein, 691 aa, Artificial Sequence
  derived and/or modified protein sequence (wt) from YFV__NC_002031.1__X-SS-prMEdelstem_TM-JEV (polyprotein: aa92-681)
MRGLSSRKRRSHDVLTVQFLILGMLLMTGGVTLVRKNRWLLLNVTSEDLGKTFSVGTGNCTTNILEAKYWCPDSMEYNCPNLSPREEPDDIDCWCYGVENVRVAYGKCDSAGRSRRSRRAIDLPTHENHGLKTRQEKWMTGRMGERQLQKIERWFVRNPFFAVTALTIAYLVGSNMTQRVVIALLVLAVGPAYSAHCIGITDRDFIEGVHGGTWVSATLEQDKCVTVMAPDKPSLDISLETVAIDRPAEVRKVCYNAVLTHVKINDKCPSTGEAHLAEENEGDNACKRTYSDRGWGNGCGLFGKGSIVACAKFTCAKSMSLFEVDQTKIQYVIRAQLHVGAKQENWNTDIKTLKFDALSGSQEVEFIGYGKATLECQVQTAVDFGNSYIAEMETESWIVDRQWAQDLTLPWQSGSGGVWREMHHLVEFEPPHAATIRVLALGNQEGSLKTALTGAMRVTKDTNDNNLYKLHGGHVSCRVKLSALTLKGTSYKICTDKMFFVKNPTDTGHGTVVMQVKVSKGAPCRIPVIVADDLTAAINKGILVTVNPIASTNDDEVLIEVNPPFGDSYIIVGRGDSRLTYQWHKEGSSIGSTLGKAFSTTLKGAQRLAALGDTAWDFGSIGGVFNSIGRAVHQVFGGAFRTLFGGMSWITQGLMGALLLWMGVNARDRSIALAFLATGGVLVFLATNVHA

SEQ ID NO: 1588 - protein, 682 aa, Artificial Sequence
  derived and/or modified protein sequence (wt) from YFV__NC_002031.1__SSjev(V3)-prMEdelstem_TM-JEV (polyprotein: aa122-681)
MNEGSIMWLASLAVVIACAGAVTLVRKNRWLLLNVTSEDLGKTFSVGTGNCTTNILEAKYWCPDSMEYNCPNLSPREEPDDIDCWCYGVENVRVAYGKCDSAGRSRRSRRAIDLPTHENHGLKTRQEKWMTGRMGERQLQKIERWFVRNPFFAVTALTIAYLVGSNMTQRVVIALLVLAVGPAYSAHCIGITDRDFIEGVHGGTWVSATLEQDKCVTVMAPDKPSLDISLETVAIDRPAEVRKVCYNAVLTHVKINDKCPSTGEAHLAEENEGDNACKRTYSDRGWGNGCGLFGKGSIVACAKFTCAKSMSLFEVDQTKIQYVIRAQLHVGAKQENWNTDIKTLKFDALSGSQEVEFIGYGKATLECQVQTAVDFGNSYIAEMETESWIVDRQWAQDLTLPWQSGSGGVWREMHHLVEFEPPHAATIRVLALGNQEGSLKTALTGAMRVTKDTNDNNLYKLHGGHVSCRVKLSALTLKGTSYKICTDKMFFVKNPTDTGHGTVVMQVKVSKGAPCRIPVIVADDLTAAINKGILVTVNPIASTNDDEVLIEVNPPFGDSYIIVGRGDSRLTYQWHKEGSSIGSTLGKAFSTTLKGAQRLAALGDTAWDFGSIGGVFNSIGRAVHQVFGGAFRTLFGGMSWITQGLMGALLLWMGVNARDRSIALAFLATGGVLVFLATNVHA

SEQ ID NO: 1589 - RNA, 2076 nt, Artificial Sequence
  derived and/or modified CDS sequence (wt) from YFV__NC_002031.1__X-SS-prMEdelstem_TM-JEV (polyprotein: aa92-681)
augagaggauuguccucaaggaaacgccguucccaugauguucugacugugcaauuccuaauuuugggaaugcuguugaugacggguggagugaccuuggugcggaaaaacagaugguugcuccuaaaugugacaucugaggaccucgggaaaacauucucugugggcacaggcaacugcacaacaaacauuuuggaagccaaguacuggugcccagacucaauggaauacaacugucccaaucucaguccaagagaggagccagaugacauugauugcuggugcuaugggguggaaaacguuagagucgcauaugguaagugugacucagcaggcaggucuaggaggucaagaagggccauugacuugccuacgcaugaaaaccaugguuugaagacccggcaagaaaaauggaugacuggaagaaugggugaaaggcaacuccaaaagauugagagaugguucgugaggaaccccuuuuuugcagugacggcucugaccauugccuaccuugugggaagcaacaugacgcaacgagucgugauugcccuacuggucuuggcuguugguccggccuacucagcucacugcauuggaauuacugacagggauuucauugagggggugcauggaggaacuuggguuucagcuacccuggagcaagacaagugugucacuguuauggccccugacaagccuucauuggacaucucacuagagacaguagccauugauagaccugcugaggugaggaaaguguguuacaaugcaguucucacucaugugaagauuaaugacaagugccccagcacuggagaggcccaccuagcugaagagaacgaaggggacaaugcgugcaagcgcacuuauucugauagaggcuggggcaauggcuguggccuauuugggaaagggagcauuguggcaugcgccaaauucacuugugccaaauccaugaguuuguuugagguugaucagaccaaaauucaguaugucaucagagcacaauugcauguaggggccaagcaggaaaauuggaauaccgacauuaagacucucaaguuugaugcccugucaggcucccaggaagucgaguucauuggguauggaaaagcuacacuggaaugccaggugcaaacugcgguggacuuugguaacaguuacaucgcugagauggaaacagagagcuggauaguggacagacagugggcccaggacuugacccugccauggcagaguggaaguggcgggguguggagagagaugcaucaucuugucgaauuugaaccuccgcaugccgccacuaucagaguacuggcccugggaaaccaggaaggcuccuugaaaacagcucuuacuggcgcaaugaggguuacaaaggacacaaaugacaacaaccuuuacaaacuacaugguggacauguuucuugcagagugaaauugucagcuuugacacucaaggggacauccuacaaaauaugcacugacaaaauguuuuuugucaagaacccaacugacacuggccauggcacuguugugaugcaggugaaagugucaaaaggagcccccugcaggauuccagugauaguagcugaugaucuuacagcggcaaucaauaaaggcauuuugguuacaguuaaccccaucgccucaaccaaugaugaugaagugcugauugaggugaacccaccuuuuggagacagcuacauuaucguugggagaggagauucacgucucacuuaccaguggcacaaagagggaagcucaauaggcagcacgcugggcaaggccuuuucaacaacuuugaagggagcucaaagacuggcagcguugggcgacacagccugggacuuuggcucuauuggaggggucuucaacuccauaggaagagccguucaccaaguguuugguggugccuucagaacacucuuugggggaaugucuuggaucacacaagggcuaaugggugcccuacugcucuggaugggcgucaacgcacgagaccgaucaauugcuuuggccuucuuagccacaggaggugugcucguguucuuagcgaccaaugugcacgccuaa

SEQ ID NO: 1590 - RNA, 2049 nt, Artificial Sequence
  derived and/or modified CDS sequence (wt) from YFV__NC_002031.1__SSjev(V3)-prMEdelstem_TM-JEV (polyprotein: aa122-681)
augaaugaaggcucaaucauguggcucgcgagcuuggcaguugucauagcuugugcaggagccgugaccuuggugcggaaaaacagaugguugcuccuaaaugugacaucugaggaccucgggaaaacauucucugugggcacaggcaacugcacaacaaacauuuuggaagccaaguacuggugcccagacucaauggaauacaacugucccaaucucaguccaagagaggagccagaugacauugauugcuggugcuaugggguggaaaacguuagagucgcauaugguaagugugacucagcaggcaggucuaggaggucaagaagggccauugacuugccuacgcaugaaaaccaugguuugaagacccggcaagaaaaauggaugacuggaagaaugggugaaaggcaacuccaaaagauugagagaugguucgugaggaaccccuuuuuugcagugacggcucugaccauugccuaccuugugggaagcaacaugacgcaacgagucgugauugcccuacuggucuuggcuguugguccggccuacucagcucacugcauuggaauuacugacagggauuucauugagggggugcauggaggaacuuggguuucagcuacccuggagcaagacaagugugucacuguuauggccccugacaagccuucauuggacaucucacuagagacaguagccauugauagaccugcugaggugaggaaaguguguuacaaugcaguucucacucaugugaagauuaaugacaagugccccagcacuggagaggcccaccuagcugaagagaacgaaggggacaaugcgugcaagcgcacuuauucugauagaggcuggggcaauggcuguggccuauuugggaaagggagcauuguggcaugcgccaaauucacuugugccaaauccaugaguuuguuugagguugaucagaccaaaauucaguaugucaucagagcacaauugcauguaggggccaagcaggaaaauuggaauaccgacauuaagacucucaaguuugaugcccugucaggcucccaggaagucgaguucauuggguauggaaaagcuacacuggaaugccaggugcaaacugcgguggacuuugguaacaguuacaucgcugagauggaaacagagagcuggauaguggacagacagugggcccaggacuugacccugccauggcagaguggaaguggcgggguguggagagagaugcaucaucuugucgaauuugaaccuccgcaugccgccacuaucagaguacuggcccugggaaaccaggaaggcuccuugaaaacagcucuuacuggcgcaaugaggguuacaaaggacacaaaugacaacaaccuuuacaaacuacaugguggacauguuucuugcagagugaaauugucagcuuugacacucaaggggacauccuacaaaauaugcacugacaaaauguuuuuugucaagaacccaacugacacuggccauggcacuguugugaugcaggugaaagugucaaaaggagcccccugcaggauuccagugauaguagcugaugaucuuacagcggcaaucaauaaaggcauuuugguuacaguuaaccccaucgccucaaccaaugaugaugaagugcugauugaggugaacccaccuuuuggagacagcuacauuaucguugggagaggagauucacgucucacuuaccaguggcacaaagagggaagcucaauaggcagcacgcugggcaaggccuuuucaacaacuuugaagggagcucaaagacuggcagcguugggcgacacagccugggacuuuggcucuauuggaggggucuucaacuccauaggaagagccguucaccaaguguuugguggugccuucagaacacucuuugggggaaugucuuggaucacacaagggcuaaugggugcccuacugcucuggaugggcgucaacgcacgagaccgaucaauugcuuuggccuucuuagccacaggaggugugcucguguucuuagcgaccaaugugcacgccuaa

SEQ ID NO: 1591 - RNA, 2076 nt, Artificial Sequence
  derived and/or modified CDS sequence (opt1) from YFV__NC_002031.1__X-SS-prMEdelstem_TM-JEV (polyprotein: aa92-681)
augcggggccugagcucccgcaagcggcgcagccacgacgugcucaccguccaguuccugauccuggggaugcuccugaugaccggcggggugacgcuggugcggaagaaccgcuggcuccugcugaacgucaccuccgaggaccucggcaagaccuucagcguggggaccggcaacugcacgaccaacauccuggaggccaaguacuggugccccgacuccauggaguacaacugcccgaaccugagcccccgggaggagcccgacgacaucgacugcuggugcuacggcguggagaacguccgcguggccuacgggaagugcgacuccgcgggccggagccgccggucccgccgggccaucgaccuccccacccacgagaaccacgggcugaagacccgccaggagaaguggaugacgggccggaugggggagcgccagcugcagaagaucgagcggugguucgugcgcaacccguucuucgccgucaccgcccucaccaucgccuaccuggugggcagcaacaugacccagcggguggucaucgcgcugcucgugcuggccgugggccccgccuacuccgcccacugcaucgggaucacggaccgcgacuucaucgagggcguccacgggggcaccugggugagcgcgacccuggagcaggacaagugcgugaccgucauggcccccgacaagcccucccucgacaucagccuggagacgguggccaucgaccggccggccgaggugcgcaaggucugcuacaacgccgugcugacccacgugaagaucaacgacaagugccccuccaccggcgaggcgcaccucgccgaggagaacgagggggacaacgccugcaagcggaccuacagcgaccggggcugggggaacggcugcgggcuguucggcaagggcuccaucgucgccugcgccaaguucacgugcgcgaagagcaugucccuguucgagguggaccagaccaagauccaguacgucauccgcgcccagcuccacgugggggccaagcaggagaacuggaacaccgacaucaagacccugaaguucgacgcccugagcggcagccaggagguggaguucaucggguacggcaaggccacgcucgagugccagguccagaccgcgguggacuucgggaacuccuacaucgccgagauggagaccgagagcuggaucguggaccggcagugggcccaggaccugacccugcccuggcaguccggcagcggcggggucuggcgcgagaugcaccaccucguggaguucgagcccccgcacgccgccacgauccgggugcuggcgcugggcaaccaggaggggucccucaagaccgcccugaccggcgccaugcgcgucaccaaggacacgaacgacaacaaccuguacaagcuccacgggggccacgugagcugccgggugaagcuguccgcccugacccucaagggcaccagcuacaagaucugcaccgacaagauguucuucgucaagaaccccacggacaccgggcacggcaccguggugaugcaggucaagguguccaagggggcgcccugccgcaucccggugaucgucgccgacgaccugaccgccgccaucaacaagggcauccuggugaccgugaacccgaucgccagcacgaacgacgacgagguccucaucgaggugaacccccccuucggcgacuccuacaucaucguggggcggggcgacagccgccugaccuaccaguggcacaaggagggguccagcaucggcagcacccuggggaaggccuucuccaccacgcucaagggcgcccagcgccuggcggcccugggggacaccgccugggacuucggcagcaucgggggcguguucaacuccaucggccgggccguccaccagguguucgggggcgccuuccgcacccucuucgggggcaugagcuggaucacccaggggcugaugggcgcgcugcuccuguggaugggggugaacgcccgggaccgcuccaucgcccuggccuuccucgcgacgggcggcguccugguguuccuggccaccaacgugcacgccuga

SEQ ID NO: 1592 - RNA, 2049 nt, Artificial Sequence
  derived and/or modified CDS sequence (opt1) from YFV__NC_002031.1__SSjev(V3)-prMEdelstem_TM-JEV (polyprotein: aa122-681)
augaacgagggcagcaucauguggcuggccucccucgccguggucaucgcgugcgccggggccgugacgcuggugcggaagaaccgcuggcuccugcugaacgucaccuccgaggaccucggcaagaccuucagcguggggaccggcaacugcacgaccaacauccuggaggccaaguacuggugccccgacuccauggaguacaacugcccgaaccugagcccccgggaggagcccgacgacaucgacugcuggugcuacggcguggagaacguccgcguggccuacgggaagugcgacuccgcgggccggagccgccggucccgccgggccaucgaccuccccacccacgagaaccacgggcugaagacccgccaggagaaguggaugacgggccggaugggggagcgccagcugcagaagaucgagcggugguucgugcgcaacccguucuucgccgucaccgcccucaccaucgccuaccuggugggcagcaacaugacccagcggguggucaucgcgcugcucgugcuggccgugggccccgccuacuccgcccacugcaucgggaucacggaccgcgacuucaucgagggcguccacgggggcaccugggugagcgcgacccuggagcaggacaagugcgugaccgucauggcccccgacaagcccucccucgacaucagccuggagacgguggccaucgaccggccggccgaggugcgcaaggucugcuacaacgccgugcugacccacgugaagaucaacgacaagugccccuccaccggcgaggcgcaccucgccgaggagaacgagggggacaacgccugcaagcggaccuacagcgaccggggcugggggaacggcugcgggcuguucggcaagggcuccaucgucgccugcgccaaguucacgugcgcgaagagcaugucccuguucgagguggaccagaccaagauccaguacgucauccgcgcccagcuccacgugggggccaagcaggagaacuggaacaccgacaucaagacccugaaguucgacgcccugagcggcagccaggagguggaguucaucggguacggcaaggccacgcucgagugccagguccagaccgcgguggacuucgggaacuccuacaucgccgagauggagaccgagagcuggaucguggaccggcagugggcccaggaccugacccugcccuggcaguccggcagcggcggggucuggcgcgagaugcaccaccucguggaguucgagcccccgcacgccgccacgauccgggugcuggcgcugggcaaccaggaggggucccucaagaccgcccugaccggcgccaugcgcgucaccaaggacacgaacgacaacaaccuguacaagcuccacgggggccacgugagcugccgggugaagcuguccgcccugacccucaagggcaccagcuacaagaucugcaccgacaagauguucuucgucaagaaccccacggacaccgggcacggcaccguggugaugcaggucaagguguccaagggggcgcccugccgcaucccggugaucgucgccgacgaccugaccgccgccaucaacaagggcauccuggugaccgugaacccgaucgccagcacgaacgacgacgagguccucaucgaggugaacccccccuucggcgacuccuacaucaucguggggcggggcgacagccgccugaccuaccaguggcacaaggagggguccagcaucggcagcacccuggggaaggccuucuccaccacgcucaagggcgcccagcgccuggcggcccugggggacaccgccugggacuucggcagcaucgggggcguguucaacuccaucggccgggccguccaccagguguucgggggcgccuuccgcacccucuucgggggcaugagcuggaucacccaggggcugaugggcgcgcugcuccuguggaugggggugaacgcccgggaccgcuccaucgcccuggccuuccucgcgacgggcggcguccugguguuccuggccaccaacgugcacgccuga

SEQ ID NO: 1593 - RNA, 2076 nt, Artificial Sequence
  derived and/or modified CDS sequence (opt1) from YFV__NC_002031.1__X-SS-prMEdelstem_TM-JEV (polyprotein: aa92-681)
augcggggccugagcucccgcaagcggcgcagccacgacgugcucaccguccaguuccugauccuggggaugcuccugaugaccggcggggugacgcuggugcggaagaaccgcuggcuccugcugaacgucaccuccgaggaccucggcaagaccuucagcguggggaccggcaacugcacgaccaacauccuggaggccaaguacuggugccccgacuccauggaguacaacugcccgaaccugagcccccgggaggagcccgacgacaucgacugcuggugcuacggcguggagaacguccgcguggccuacgggaagugcgacuccgcgggccggagccgccggucccgccgggccaucgaccuccccacccacgagaaccacgggcugaagacccgccaggagaaguggaugacgggccggaugggggagcgccagcugcagaagaucgagcggugguucgugcgcaacccguucuucgccgucaccgcccucaccaucgccuaccuggugggcagcaacaugacccagcggguggucaucgcgcugcucgugcuggccgugggccccgccuacuccgcccacugcaucgggaucacggaccgcgacuucaucgagggcguccacgggggcaccugggugagcgcgacccuggagcaggacaagugcgugaccgucauggcccccgacaagcccucccucgacaucagccuggagacgguggccaucgaccggccggccgaggugcgcaaggucugcuacaacgccgugcugacccacgugaagaucaacgacaagugccccuccaccggcgaggcgcaccucgccgaggagaacgagggggacaacgccugcaagcggaccuacagcgaccggggcugggggaacggcugcgggcuguucggcaagggcuccaucgucgccugcgccaaguucacgugcgcgaaguccaugagccuguucgagguggaccagaccaagauccaguacgucauccgcgcccagcuccacgugggggccaagcaggagaacuggaacaccgacaucaagacccugaaguucgacgcccugagcggcagccaggagguggaguucaucggguacggcaaggccacgcucgagugccagguccagaccgcgguggacuucgggaacuccuacaucgccgagauggagaccgagagcuggaucguggaccggcagugggcccaggaccugacccugcccuggcaguccggcagcggcggggucuggcgcgagaugcaccaccucguggaguucgagcccccgcacgccgccacgauccgggugcuggcgcugggcaaccaggaggggucccucaagaccgcccugaccggcgccaugcgcgucaccaaggacacgaacgacaacaaccuguacaagcuccacgggggccacgugagcugccgggugaagcuguccgcccugacccucaagggcaccagcuacaagaucugcaccgacaagauguucuucgucaagaaccccacggacaccgggcacggcaccguggugaugcaggucaagguguccaagggggcgcccugccgcaucccggugaucgucgccgacgaccugaccgccgccaucaacaagggcauccuggugaccgugaacccgaucgccagcacgaacgacgacgagguccucaucgaggugaacccccccuucggcgacuccuacaucaucguggggcggggcgacagccgccugaccuaccaguggcacaaggagggguccagcaucggcagcacccuggggaaggccuucuccaccacgcucaagggcgcccagcgccuggcggcccugggggacaccgccugggacuucggcagcaucgggggcguguucaacuccaucggccgggccguccaccagguguucgggggcgccuuccgcacccucuucgggggcaugagcuggaucacccaggggcugaugggcgcgcugcuccuguggaugggggugaacgcccgggaccgcuccaucgcccuggccuuccucgcgacgggcggcguccugguguuccuggccaccaacgugcacgccuga

SEQ ID NO: 1594 - RNA, 2049 nt, Artificial Sequence
  derived and/or modified CDS sequence (opt1) from YFV__NC_002031.1__SSjev(V3)-prMEdelstem_TM-JEV (polyprotein: aa122-681)
augaacgagggcagcaucauguggcuggccucccucgccguggucaucgcgugcgccggggccgugacgcuggugcggaagaaccgcuggcuccugcugaacgucaccuccgaggaccucggcaagaccuucagcguggggaccggcaacugcacgaccaacauccuggaggccaaguacuggugccccgacuccauggaguacaacugcccgaaccugagcccccgggaggagcccgacgacaucgacugcuggugcuacggcguggagaacguccgcguggccuacgggaagugcgacuccgcgggccggagccgccggucccgccgggccaucgaccuccccacccacgagaaccacgggcugaagacccgccaggagaaguggaugacgggccggaugggggagcgccagcugcagaagaucgagcggugguucgugcgcaacccguucuucgccgucaccgcccucaccaucgccuaccuggugggcagcaacaugacccagcggguggucaucgcgcugcucgugcuggccgugggccccgccuacuccgcccacugcaucgggaucacggaccgcgacuucaucgagggcguccacgggggcaccugggugagcgcgacccuggagcaggacaagugcgugaccgucauggcccccgacaagcccucccucgacaucagccuggagacgguggccaucgaccggccggccgaggugcgcaaggucugcuacaacgccgugcugacccacgugaagaucaacgacaagugccccuccaccggcgaggcgcaccucgccgaggagaacgagggggacaacgccugcaagcggaccuacagcgaccggggcugggggaacggcugcgggcuguucggcaagggcuccaucgucgccugcgccaaguucacgugcgcgaaguccaugagccuguucgagguggaccagaccaagauccaguacgucauccgcgcccagcuccacgugggggccaagcaggagaacuggaacaccgacaucaagacccugaaguucgacgcccugagcggcagccaggagguggaguucaucggguacggcaaggccacgcucgagugccagguccagaccgcgguggacuucgggaacuccuacaucgccgagauggagaccgagagcuggaucguggaccggcagugggcccaggaccugacccugcccuggcaguccggcagcggcggggucuggcgcgagaugcaccaccucguggaguucgagcccccgcacgccgccacgauccgggugcuggcgcugggcaaccaggaggggucccucaagaccgcccugaccggcgccaugcgcgucaccaaggacacgaacgacaacaaccuguacaagcuccacgggggccacgugagcugccgggugaagcuguccgcccugacccucaagggcaccagcuacaagaucugcaccgacaagauguucuucgucaagaaccccacggacaccgggcacggcaccguggugaugcaggucaagguguccaagggggcgcccugccgcaucccggugaucgucgccgacgaccugaccgccgccaucaacaagggcauccuggugaccgugaacccgaucgccagcacgaacgacgacgagguccucaucgaggugaacccccccuucggcgacuccuacaucaucguggggcggggcgacagccgccugaccuaccaguggcacaaggagggguccagcaucggcagcacccuggggaaggccuucuccaccacgcucaagggcgcccagcgccuggcggcccugggggacaccgccugggacuucggcagcaucgggggcguguucaacuccaucggccgggccguccaccagguguucgggggcgccuuccgcacccucuucgggggcaugagcuggaucacccaggggcugaugggcgcgcugcuccuguggaugggggugaacgcccgggaccgcuccaucgcccuggccuuccucgcgacgggcggcguccugguguuccuggccaccaacgugcacgccuga

SEQ ID NO: 1595 - RNA, 2076 nt, Artificial Sequence
  derived and/or modified CDS sequence (opt1) from YFV__NC_002031.1__X-SS-prMEdelstem_TM-JEV (polyprotein: aa92-681)
augcggggccugagcucccgcaagcggcgcagccacgacgugcucaccguccaguuccugauccuggggaugcuccugaugaccggcggggugacgcuggugcggaagaaccgcuggcuccugcugaacgucaccuccgaggaccucggcaagaccuucagcguggggaccggcaacugcacgaccaacauccuggaggccaaguacuggugccccgacuccauggaguacaacugccccaaccugagcccccgggaggagcccgacgacaucgacugcuggugcuacggcguggagaacguccgcguggccuacgggaagugcgacuccgcgggccggagccgccggucccgccgggccaucgaccuccccacccacgagaaccacgggcugaagacccgccaggagaaguggaugacgggccggaugggggagcgccagcugcagaagaucgagcggugguucgugcgcaacccguucuucgccgucaccgcccucaccaucgccuaccuggugggcagcaacaugacccagcggguggucaucgcgcugcucgugcuggccgugggccccgccuacuccgcccacugcaucgggaucacggaccgcgacuucaucgagggcguccacgggggcaccugggugagcgcgacccuggagcaggacaagugcgugaccgucauggcccccgacaagcccucccucgacaucagccuggagacgguggccaucgaccggccggccgaggugcgcaaggucugcuacaacgccgugcugacccacgugaagaucaacgacaagugccccuccaccggcgaggcgcaccucgccgaggagaacgagggggacaacgccugcaagcggaccuacagcgaccggggcugggggaacggcugcgggcuguucggcaagggcuccaucgucgccugcgccaaguucacgugcgcgaaguccaugagccuguucgagguggaccagaccaagauccaguacgucauccgcgcccagcuccacgugggggccaagcaggagaacuggaacaccgacaucaagacccugaaguucgacgcccugagcggcagccaggagguggaguucaucggguacggcaaggccacgcucgagugccagguccagaccgcgguggacuucgggaacuccuacaucgccgagauggagaccgagagcuggaucguggaccggcagugggcccaggaccugacccugcccuggcaguccggcagcggcggggucuggcgcgagaugcaccaccucguggaguucgagcccccgcacgccgccacgauccgggugcuggcgcugggcaaccaggaggggucccucaagaccgcccugaccggcgccaugcgcgucaccaaggacacgaacgacaacaaccuguacaagcuccacgggggccacgugagcugccgggugaagcuguccgcccugacccucaagggcaccagcuacaagaucugcaccgacaagauguucuucgucaagaaccccacggacaccgggcacggcaccguggugaugcaggucaagguguccaagggggcgcccugccgcaucccggugaucgucgccgacgaccugaccgccgccaucaacaagggcauccuggugaccgugaacccgaucgccagcacgaacgacgacgagguccucaucgaggugaacccgcccuucggcgacuccuacaucaucguggggcggggcgacagccgccugaccuaccaguggcacaaggagggguccagcaucggaagcacgcugggcaaggccuuuucaacaacuuugaagggagcucaaagacuggcagcguugggcgacacagccugggacuuuggcucuauuggaggggucuucaacuccauagguagagccguucaccaaguguuuggaggugccuucagaacacucuuugggggaaugucuuggaucacacaagggcuaaugggugcccuacugcucuggaugggcgucaacgcacgagaccgaucaauugcuuuggccuucuuagccacaggaggugugcucguguucuuagcgaccaaugugcacgccuga

SEQ ID NO: 1596 - RNA, 2049 nt, Artificial Sequence
  derived and/or modified CDS sequence (opt1) from YFV__NC_002031.1__SSjev(V3)-prMEdelstem_TM-JEV (polyprotein: aa122-681)
augaacgagggcagcaucauguggcuggccucccucgccguggucaucgcgugcgccggggccgugacgcuggugcggaagaaccgcuggcuccugcugaacgucaccuccgaggaccucggcaagaccuucagcguggggaccggcaacugcacgaccaacauccuggaggccaaguacuggugccccgacuccauggaguacaacugccccaaccugagcccccgggaggagcccgacgacaucgacugcuggugcuacggcguggagaacguccgcguggccuacgggaagugcgacuccgcgggccggagccgccggucccgccgggccaucgaccuccccacccacgagaaccacgggcugaagacccgccaggagaaguggaugacgggccggaugggggagcgccagcugcagaagaucgagcggugguucgugcgcaacccguucuucgccgucaccgcccucaccaucgccuaccuggugggcagcaacaugacccagcggguggucaucgcgcugcucgugcuggccgugggccccgccuacuccgcccacugcaucgggaucacggaccgcgacuucaucgagggcguccacgggggcaccugggugagcgcgacccuggagcaggacaagugcgugaccgucauggcccccgacaagcccucccucgacaucagccuggagacgguggccaucgaccggccggccgaggugcgcaaggucugcuacaacgccgugcugacccacgugaagaucaacgacaagugccccuccaccggcgaggcgcaccucgccgaggagaacgagggggacaacgccugcaagcggaccuacagcgaccggggcugggggaacggcugcgggcuguucggcaagggcuccaucgucgccugcgccaaguucacgugcgcgaaguccaugagccuguucgagguggaccagaccaagauccaguacgucauccgcgcccagcuccacgugggggccaagcaggagaacuggaacaccgacaucaagacccugaaguucgacgcccugagcggcagccaggagguggaguucaucggguacggcaaggccacgcucgagugccagguccagaccgcgguggacuucgggaacuccuacaucgccgagauggagaccgagagcuggaucguggaccggcagugggcccaggaccugacccugcccuggcaguccggcagcggcggggucuggcgcgagaugcaccaccucguggaguucgagcccccgcacgccgccacgauccgggugcuggcgcugggcaaccaggaggggucccucaagaccgcccugaccggcgccaugcgcgucaccaaggacacgaacgacaacaaccuguacaagcuccacgggggccacgugagcugccgggugaagcuguccgcccugacccucaagggcaccagcuacaagaucugcaccgacaagauguucuucgucaagaaccccacggacaccgggcacggcaccguggugaugcaggucaagguguccaagggggcgcccugccgcaucccggugaucgucgccgacgaccugaccgccgccaucaacaagggcauccuggugaccgugaacccgaucgccagcacgaacgacgacgagguccucaucgaggugaacccgcccuucggcgacuccuacaucaucguggggcggggcgacagccgccugaccuaccaguggcacaaggagggguccagcaucggcagcacccuggggaaggccuucuccaccacgcucaagggcgcccagcgccuggcggcccugggggacaccgccugggacuucggcagcaucgggggcguguucaacuccaucggccgggccguccaccagguguucgggggcgccuuccgcacccucuucgggggcaugagcuggaucacccaggggcugaugggcgcgcugcuccuguggaugggggugaacgcccgggaccgcuccaucgcccuggccuuccucgcgacgggcggcguccugguguuccuggccaccaacgugcacgccuga

SEQ ID NO: 1597 - RNA, 2076 nt, Artificial Sequence
  derived and/or modified CDS sequence (opt2) from YFV__NC_002031.1__X-SS-prMEdelstem_TM-JEV (polyprotein: aa92-681)
augcgcggccucuccucccgcaagcgccgcucccacgacguccucaccguccaguuccucauccucggcaugcuccucaugaccggcggcgucacccucguccgcaagaaccgcuggcuccuccucaacgucaccuccgaggaccucggcaagaccuucuccgucggcaccggcaacugcaccaccaacauccucgaggccaaguacuggugccccgacuccauggaguacaacugccccaaccucuccccccgcgaggagcccgacgacaucgacugcuggugcuacggcgucgagaacguccgcgucgccuacggcaagugcgacuccgccggccgcucccgccgcucccgccgcgccaucgaccuccccacccacgagaaccacggccucaagacccgccaggagaaguggaugaccggccgcaugggcgagcgccagcuccagaagaucgagcgcugguucguccgcaaccccuucuucgccgucaccgcccucaccaucgccuaccucgucggcuccaacaugacccagcgcgucgucaucgcccuccucguccucgccgucggccccgccuacuccgcccacugcaucggcaucaccgaccgcgacuucaucgagggcguccacggcggcaccugggucuccgccacccucgagcaggacaagugcgucaccgucauggcccccgacaagcccucccucgacaucucccucgagaccgucgccaucgaccgccccgccgagguccgcaaggucugcuacaacgccguccucacccacgucaagaucaacgacaagugccccuccaccggcgaggcccaccucgccgaggagaacgagggcgacaacgccugcaagcgcaccuacuccgaccgcggcuggggcaacggcugcggccucuucggcaagggcuccaucgucgccugcgccaaguucaccugcgccaaguccaugucccucuucgaggucgaccagaccaagauccaguacgucauccgcgcccagcuccacgucggcgccaagcaggagaacuggaacaccgacaucaagacccucaaguucgacgcccucuccggcucccaggaggucgaguucaucggcuacggcaaggccacccucgagugccagguccagaccgccgucgacuucggcaacuccuacaucgccgagauggagaccgaguccuggaucgucgaccgccagugggcccaggaccucacccuccccuggcaguccggcuccggcggcgucuggcgcgagaugcaccaccucgucgaguucgagcccccccacgccgccaccauccgcguccucgcccucggcaaccaggagggcucccucaagaccgcccucaccggcgccaugcgcgucaccaaggacaccaacgacaacaaccucuacaagcuccacggcggccacgucuccugccgcgucaagcucuccgcccucacccucaagggcaccuccuacaagaucugcaccgacaagauguucuucgucaagaaccccaccgacaccggccacggcaccgucgucaugcaggucaaggucuccaagggcgcccccugccgcauccccgucaucgucgccgacgaccucaccgccgccaucaacaagggcauccucgucaccgucaaccccaucgccuccaccaacgacgacgagguccucaucgaggucaacccccccuucggcgacuccuacaucaucgucggccgcggcgacucccgccucaccuaccaguggcacaaggagggcuccuccaucggcuccacccucggcaaggccuucuccaccacccucaagggcgcccagcgccucgccgcccucggcgacaccgccugggacuucggcuccaucggcggcgucuucaacuccaucggccgcgccguccaccaggucuucggcggcgccuuccgcacccucuucggcggcauguccuggaucacccagggccucaugggcgcccuccuccucuggaugggcgucaacgcccgcgaccgcuccaucgcccucgccuuccucgccaccggcggcguccucgucuuccucgccaccaacguccacgccuga

SEQ ID NO: 1598 - RNA, 2049 nt, Artificial Sequence
  derived and/or modified CDS sequence (opt2) from YFV__NC_002031.1__SSjev(V3)-prMEdelstem_TM-JEV (polyprotein: aa122-681)
augaacgagggcuccaucauguggcucgccucccucgccgucgucaucgccugcgccggcgccgucacccucguccgcaagaaccgcuggcuccuccucaacgucaccuccgaggaccucggcaagaccuucuccgucggcaccggcaacugcaccaccaacauccucgaggccaaguacuggugccccgacuccauggaguacaacugccccaaccucuccccccgcgaggagcccgacgacaucgacugcuggugcuacggcgucgagaacguccgcgucgccuacggcaagugcgacuccgccggccgcucccgccgcucccgccgcgccaucgaccuccccacccacgagaaccacggccucaagacccgccaggagaaguggaugaccggccgcaugggcgagcgccagcuccagaagaucgagcgcugguucguccgcaaccccuucuucgccgucaccgcccucaccaucgccuaccucgucggcuccaacaugacccagcgcgucgucaucgcccuccucguccucgccgucggccccgccuacuccgcccacugcaucggcaucaccgaccgcgacuucaucgagggcguccacggcggcaccugggucuccgccacccucgagcaggacaagugcgucaccgucauggcccccgacaagcccucccucgacaucucccucgagaccgucgccaucgaccgccccgccgagguccgcaaggucugcuacaacgccguccucacccacgucaagaucaacgacaagugccccuccaccggcgaggcccaccucgccgaggagaacgagggcgacaacgccugcaagcgcaccuacuccgaccgcggcuggggcaacggcugcggccucuucggcaagggcuccaucgucgccugcgccaaguucaccugcgccaaguccaugucccucuucgaggucgaccagaccaagauccaguacgucauccgcgcccagcuccacgucggcgccaagcaggagaacuggaacaccgacaucaagacccucaaguucgacgcccucuccggcucccaggaggucgaguucaucggcuacggcaaggccacccucgagugccagguccagaccgccgucgacuucggcaacuccuacaucgccgagauggagaccgaguccuggaucgucgaccgccagugggcccaggaccucacccuccccuggcaguccggcuccggcggcgucuggcgcgagaugcaccaccucgucgaguucgagcccccccacgccgccaccauccgcguccucgcccucggcaaccaggagggcucccucaagaccgcccucaccggcgccaugcgcgucaccaaggacaccaacgacaacaaccucuacaagcuccacggcggccacgucuccugccgcgucaagcucuccgcccucacccucaagggcaccuccuacaagaucugcaccgacaagauguucuucgucaagaaccccaccgacaccggccacggcaccgucgucaugcaggucaaggucuccaagggcgcccccugccgcauccccgucaucgucgccgacgaccucaccgccgccaucaacaagggcauccucgucaccgucaaccccaucgccuccaccaacgacgacgagguccucaucgaggucaacccccccuucggcgacuccuacaucaucgucggccgcggcgacucccgccucaccuaccaguggcacaaggagggcuccuccaucggcuccacccucggcaaggccuucuccaccacccucaagggcgcccagcgccucgccgcccucggcgacaccgccugggacuucggcuccaucggcggcgucuucaacuccaucggccgcgccguccaccaggucuucggcggcgccuuccgcacccucuucggcggcauguccuggaucacccagggccucaugggcgcccuccuccucuggaugggcgucaacgcccgcgaccgcuccaucgcccucgccuuccucgccaccggcggcguccucgucuuccucgccaccaacguccacgccuga

SEQ ID NO: 1599 - RNA, 2076 nt, Artificial Sequence
  derived and/or modified CDS sequence (opt3) from YFV__NC_002031.1__X-SS-prMEdelstem_TM-JEV (polyprotein: aa92-681)
augagaggccugagcuccaggaagcggcgcucucacgacgugcucaccguccaguuccuuauccuggggauguuguuaaugacaggagguguuacucuggugcguaaaaaccgauggcuacuccugaauguaacgucagaggaucuuggcaagaccuuuaguguggggacaggaaacugcacuaccaauauucuggaagccaaauacuggugucccgacagcauggaguauaacugcccuaauuuguccccaagagaggaaccggaugacauagauuguuggugcuacggcgucgaaaacgugaggguugcuuaugguaagugugacucugcagggcggucgcgcagaucaaggcgggccaucgaucuccccacacaugagaaucacggacugaaaacccgccaagagaaguggaugacuggccgaaugggcgaaagacagcugcagaagauugagaggugguucgugcggaacccuuucuucgcggucacagcucucaccaucgccuacuuaguggggagcaauaugacgcagcguguaguuauugcacugcuuguguuggccgucggaccagcuuauagugcacauugcaucgguauaacugaccgcgauuuuaucgaaggcgugcacgggggaaccuggguguccgccacacuggagcaagacaaaugugucacuguuauggcucccgauaagccuucucuagacauuagccucgagaccguggccaucgauagaccagcggaaguaaggaaagugugcuacaacgcaguccugacacaugugaagauuaaugacaaaugucccuccaccggcgaggcccaccuugcugaagagaacgaaggugacaaugccugcaagcggacguauucagaucgaggguggggaaacggcuguggccuguucgggaagggaaguaucguugcaugcgcuaaauuuacuugcgccaagagcaugucuuuguucgagguggaccagacaaaaauacaguacgucauucgcgcgcagcuccacgugggugccaagcaagagaauuggaacaccgauaucaaaacucugaaguuugacgcauuauccggcucacaggaaguagaguucauuggguacggaaaagcuacacuggaaugucagguucagaccgccguggauuuuggcaacagcuauaucgcugagauggaaacggagaguuggaucgucgacagacaaugggcccaggaucucacccuuccuuggcagucugguuccgggggcguguggagggagaugcaucaccuggucgaauuugagccaccgcaugcagccacaauucggguguuggcucuaggaaaucaagaaggcagccugaagacugcgcucaccggggcaaugcgcguuacaaaggacacuaacgauaauaaccuguacaaacuucacggaggucacgugucgugcagaguaaagcugucugccuugacccucaaaggcacauccuauaagauauguaccgacaaaauguuuuucgucaagaaucccacugauacggggcauggaacagugguuaugcaagugaaggucucaaaaggcgcuccuugcaggaucccagugauuguagccgacgaccugaccgcagccaucaacaaggguauauuagugacuguuaaucccauugcuaguaccaacgaugacgagguccugaucgaagugaauccuccauucggggauagcuacaucauugugggccguggagacucccggcuaacauaucaguggcacaaagagggcucuagcaucggcagcacccuggggaaggccuucuccacaacucucaaaggagcucagagacuugcagcccugggugacacggcgugggauuuuggcucuaucgggggaguguucaacucaauuggcagggcuguccaccaaguuuuugguggggccuuccggaccuuguuuggaggcaugaguuggauaacacagggcuuaaugggggcacugcuacucuggaugggagugaaugcccgcgaccgaagcaucgcucuggcauuccuugccacugguggcguacugguguuuuuggcuaccaacguccaugccuga

SEQ ID NO: 1600 - RNA, 2049 nt, Artificial Sequence
  derived and/or modified CDS sequence (opt3) from YFV__NC_002031.1__SSjev(V3)-prMEdelstem_TM-JEV (polyprotein: aa122-681)
augaacgagggcagcaucauguggcuggccucccucgcuguggucauugcaugcgccggggcgguuacucuggugcguaaaaaccgauggcuacuccugaauguaacgucagaggaucuuggcaagaccuuuaguguggggacaggaaacugcacuaccaauauucuggaagccaaauacuggugucccgacagcauggaguauaacugcccuaauuuguccccaagagaggaaccggaugacauagauuguuggugcuacggcgucgaaaacgugaggguugcuuaugguaagugugacucugcagggcggucgcgcagaucaaggcgggccaucgaucuccccacacaugagaaucacggacugaaaacccgccaagagaaguggaugacuggccgaaugggcgaaagacagcugcagaagauugagaggugguucgugcggaacccuuucuucgcggucacagcucucaccaucgccuacuuaguggggagcaauaugacgcagcguguaguuauugcacugcuuguguuggccgucggaccagcuuauagugcacauugcaucgguauaacugaccgcgauuuuaucgaaggcgugcacgggggaaccuggguguccgccacacuggagcaagacaaaugugucacuguuauggcucccgauaagccuucucuagacauuagccucgagaccguggccaucgauagaccagcggaaguaaggaaagugugcuacaacgcaguccugacacaugugaagauuaaugacaaaugucccuccaccggcgaggcccaccuugcugaagagaacgaaggugacaaugccugcaagcggacguauucagaucgaggguggggaaacggcuguggccuguucgggaagggaaguaucguugcaugcgcuaaauuuacuugcgccaagagcaugucuuuguucgagguggaccagacaaaaauacaguacgucauucgcgcgcagcuccacgugggugccaagcaagagaauuggaacaccgauaucaaaacucugaaguuugacgcauuauccggcucacaggaaguagaguucauuggguacggaaaagcuacacuggaaugucagguucagaccgccguggauuuuggcaacagcuauaucgcugagauggaaacggagaguuggaucgucgacagacaaugggcccaggaucucacccuuccuuggcagucugguuccgggggcguguggagggagaugcaucaccuggucgaauuugagccaccgcaugcagccacaauucggguguuggcucuaggaaaucaagaaggcagccugaagacugcgcucaccggggcaaugcgcguuacaaaggacacuaacgauaauaaccuguacaaacuucacggaggucacgugucgugcagaguaaagcugucugccuugacccucaaaggcacauccuauaagauauguaccgacaaaauguuuuucgucaagaaucccacugauacggggcauggaacagugguuaugcaagugaaggucucaaaaggcgcuccuugcaggaucccagugauuguagccgacgaccugaccgcagccaucaacaaggguauauuagugacuguuaaucccauugcuaguaccaacgaugacgagguccugaucgaagugaauccuccauucggggauagcuacaucauugugggccguggagacucccggcuaacauaucaguggcacaaagagggcucuagcaucggcagcacccuggggaaggccuucuccacaacucucaaaggagcucagagacuugcagcccugggugacacggcgugggauuuuggcucuaucgggggaguguucaacucaauuggcagggcuguccaccaaguuuuugguggggccuuccggaccuuguuuggaggcaugaguuggauaacacagggcuuaaugggggcacugcuacucuggaugggagugaaugcccgcgaccgaagcaucgcucuggcauuccuugccacugguggcguacugguguuuuuggcuaccaacguccaugccuga

SEQ ID NO: 1601 - RNA, 2076 nt, Artificial Sequence
  derived and/or modified CDS sequence (opt4) from YFV__NC_002031.1__X-SS-prMEdelstem_TM-JEV (polyprotein: aa92-681)
augagaggccugagcagcagaaagagaagaagccacgacgugcugaccgugcaguuccugauccugggcaugcugcugaugaccggcggcgugacccuggugagaaagaacagauggcugcugcugaacgugaccagcgaggaccugggcaagaccuucagcgugggcaccggcaacugcaccaccaacauccuggaggccaaguacuggugccccgacagcauggaguacaacugccccaaccugagccccagagaggagcccgacgacaucgacugcuggugcuacggcguggagaacgugagaguggccuacggcaagugcgacagcgccggcagaagcagaagaagcagaagagccaucgaccugcccacccacgagaaccacggccugaagaccagacaggagaaguggaugaccggcagaaugggcgagagacagcugcagaagaucgagagaugguucgugagaaaccccuucuucgccgugaccgcccugaccaucgccuaccuggugggcagcaacaugacccagagaguggugaucgcccugcuggugcuggccgugggccccgccuacagcgcccacugcaucggcaucaccgacagagacuucaucgagggcgugcacggcggcaccugggugagcgccacccuggagcaggacaagugcgugaccgugauggcccccgacaagcccagccuggacaucagccuggagaccguggccaucgacagacccgccgaggugagaaaggugugcuacaacgccgugcugacccacgugaagaucaacgacaagugccccagcaccggcgaggcccaccuggccgaggagaacgagggcgacaacgccugcaagagaaccuacagcgacagaggcuggggcaacggcugcggccuguucggcaagggcagcaucguggccugcgccaaguucaccugcgccaagagcaugagccuguucgagguggaccagaccaagauccaguacgugaucagagcccagcugcacgugggcgccaagcaggagaacuggaacaccgacaucaagacccugaaguucgacgcccugagcggcagccaggagguggaguucaucggcuacggcaaggccacccuggagugccaggugcagaccgccguggacuucggcaacagcuacaucgccgagauggagaccgagagcuggaucguggacagacagugggcccaggaccugacccugcccuggcagagcggcagcggcggcguguggagagagaugcaccaccugguggaguucgagcccccccacgccgccaccaucagagugcuggcccugggcaaccaggagggcagccugaagaccgcccugaccggcgccaugagagugaccaaggacaccaacgacaacaaccuguacaagcugcacggcggccacgugagcugcagagugaagcugagcgcccugacccugaagggcaccagcuacaagaucugcaccgacaagauguucuucgugaagaaccccaccgacaccggccacggcaccguggugaugcaggugaaggugagcaagggcgcccccugcagaauccccgugaucguggccgacgaccugaccgccgccaucaacaagggcauccuggugaccgugaaccccaucgccagcaccaacgacgacgaggugcugaucgaggugaacccccccuucggcgacagcuacaucaucgugggcagaggcgacagcagacugaccuaccaguggcacaaggagggcagcagcaucggcagcacccugggcaaggccuucagcaccacccugaagggcgcccagagacuggccgcccugggcgacaccgccugggacuucggcagcaucggcggcguguucaacagcaucggcagagccgugcaccagguguucggcggcgccuucagaacccuguucggcggcaugagcuggaucacccagggccugaugggcgcccugcugcuguggaugggcgugaacgccagagacagaagcaucgcccuggccuuccuggccaccggcggcgugcugguguuccuggccaccaacgugcacgccuga

SEQ ID NO: 1602 - RNA, 2049 nt, Artificial Sequence
  derived and/or modified CDS sequence (opt4) from YFV__NC_002031.1__SSjev(V3)-prMEdelstem_TM-JEV (polyprotein: aa122-681)
augaacgagggcagcaucauguggcuggccagccuggccguggugaucgccugcgccggcgccgugacccuggugagaaagaacagauggcugcugcugaacgugaccagcgaggaccugggcaagaccuucagcgugggcaccggcaacugcaccaccaacauccuggaggccaaguacuggugccccgacagcauggaguacaacugccccaaccugagccccagagaggagcccgacgacaucgacugcuggugcuacggcguggagaacgugagaguggccuacggcaagugcgacagcgccggcagaagcagaagaagcagaagagccaucgaccugcccacccacgagaaccacggccugaagaccagacaggagaaguggaugaccggcagaaugggcgagagacagcugcagaagaucgagagaugguucgugagaaaccccuucuucgccgugaccgcccugaccaucgccuaccuggugggcagcaacaugacccagagaguggugaucgcccugcuggugcuggccgugggccccgccuacagcgcccacugcaucggcaucaccgacagagacuucaucgagggcgugcacggcggcaccugggugagcgccacccuggagcaggacaagugcgugaccgugauggcccccgacaagcccagccuggacaucagccuggagaccguggccaucgacagacccgccgaggugagaaaggugugcuacaacgccgugcugacccacgugaagaucaacgacaagugccccagcaccggcgaggcccaccuggccgaggagaacgagggcgacaacgccugcaagagaaccuacagcgacagaggcuggggcaacggcugcggccuguucggcaagggcagcaucguggccugcgccaaguucaccugcgccaagagcaugagccuguucgagguggaccagaccaagauccaguacgugaucagagcccagcugcacgugggcgccaagcaggagaacuggaacaccgacaucaagacccugaaguucgacgcccugagcggcagccaggagguggaguucaucggcuacggcaaggccacccuggagugccaggugcagaccgccguggacuucggcaacagcuacaucgccgagauggagaccgagagcuggaucguggacagacagugggcccaggaccugacccugcccuggcagagcggcagcggcggcguguggagagagaugcaccaccugguggaguucgagcccccccacgccgccaccaucagagugcuggcccugggcaaccaggagggcagccugaagaccgcccugaccggcgccaugagagugaccaaggacaccaacgacaacaaccuguacaagcugcacggcggccacgugagcugcagagugaagcugagcgcccugacccugaagggcaccagcuacaagaucugcaccgacaagauguucuucgugaagaaccccaccgacaccggccacggcaccguggugaugcaggugaaggugagcaagggcgcccccugcagaauccccgugaucguggccgacgaccugaccgccgccaucaacaagggcauccuggugaccgugaaccccaucgccagcaccaacgacgacgaggugcugaucgaggugaacccccccuucggcgacagcuacaucaucgugggcagaggcgacagcagacugaccuaccaguggcacaaggagggcagcagcaucggcagcacccugggcaaggccuucagcaccacccugaagggcgcccagagacuggccgcccugggcgacaccgccugggacuucggcagcaucggcggcguguucaacagcaucggcagagccgugcaccagguguucggcggcgccuucagaacccuguucggcggcaugagcuggaucacccagggccugaugggcgcccugcugcuguggaugggcgugaacgccagagacagaagcaucgcccuggccuuccuggccaccggcggcgugcugguguuccuggccaccaacgugcacgccuga

SEQ ID NO: 1603 - RNA, 2076 nt, Artificial Sequence
  derived and/or modified CDS sequence (opt5) from YFV__NC_002031.1__X-SS-prMEdelstem_TM-JEV (polyprotein: aa92-681)
augagaggccugagcucccggaagcgcagaucucacgacgugcucaccguccaguuccugauccuugggaugcugcucaugacaggaggcguuacgcuggugcggaaaaaccgcuggcuucugcucaaugugaccagcgaggaucuggggaagacauuuuccgucggaaccggcaacugcacaaccaauauucuggaagccaaauacuggugucccgacucuauggaguauaacugcccuaaucucagcccgagagaagaacccgaugacaucgauuguuggugcuacgggguggaaaacguucggguggcuuauggaaagugugacuccgccggccgcucuagacggagccgcagagcgauugaucugccuacacaugagaaucacggccuuaaaacccggcaagagaaguggaugacggggcgcaugggagaaagacagcugcagaagaucgagcggugguucguccgcaaccccuuuuucgcugugaccgcccucacaauugccuaccugguuggcuccaauaugacccagagaguggucaucgcccuucuggugcucgcuguggggccugcuuauagcgcccauugcaucggaauuacagaccgggauuuuaucgaaggcguccacgggggaaccuggguuucugcgacgcuggagcaagacaaaugugugacagugauggcccccgauaagccuucccuggacauuagccucgagaccgucgcuaucgauagaccggccgaagugcgcaaaguuugcuacaacgcugugcugacacaugucaagauuaaugacaaaugucccucuaccggcgaggcccaccuugcggaagagaacgaaggcgacaaugccugcaagcggaccuauuccgauagaggguggggaaacggcugugggcuguucggaaagggcagcaucguggcuugcgccaaauuuacaugcgcuaagucuaugucccucuucgagguugaccagacgaaaauucaguacgugauccgcgcccagcugcacgucggggccaagcaagagaauuggaacaccgauaucaaaacacuuaaguuugacgcucugagcggaucccaggaaguggaguucauuggcuacggcaaagcgacccucgaaugucagguccagacagccguggauuuugggaacucuuauaucgcugagauggaaaccgagagcuggauuguugaccggcaaugggcccaggaucugacgcugccuuggcaguccggaagcggcgggguguggagagagaugcaucaccucgucgaguucgagcccccucaugccgcuacaauccgcgugcuggcccuuggaaaucaagaaggcucucugaagaccgcgcucaccggggcuaugcggguuacaaaggacaccaacgauaauaaccuguacaaacuucacggcggacacguguccugcagagucaagcugagcgcccucacacugaaaggcacgucuuauaagauuuguaccgacaaaauguuuuucgugaagaaucccacagauaccgggcauggaacagugguuaugcaggucaaggugagcaaaggcgccccgugccgcaucccugugaucgucgcugacgaccugaccgccgcuauuaacaaggggauccucgugacgguuaaucccauugccuccaccaacgaugacgaggugcugaucgaagucaauccucccuucggagauucuuacauuaucgugggccggggagacagcagacuuacauaucaguggcacaaagagggcuccagcaucggcagcacccuggggaaggccuucuccacaacgcucaaaggagcucagagacuggccgcgcuuggcgacaccgcuugggauuuugggucuaucggaggcguguucaacagcauugggcgggccguccaccaaguuuuuggaggcgccuuccgcacacuguuuggcgggauguccuggaucacccagggacucaugggcgcucugcuucuguggaugggggugaaugccagagaccggucuauugcucucgccuuccuggcgacaggaggcgugcuggucuuucucgccaccaacgugcaugcuuga

SEQ ID NO: 1604 - RNA, 2049 nt, Artificial Sequence
  derived and/or modified CDS sequence (opt5) from YFV__NC_002031.1__SSjev(V3)-prMEdelstem_TM-JEV (polyprotein: aa122-681)
augaacgagggcagcaucauguggcuggccucccucgcuguggucauugccugcgcgggggcuguuacgcuggugcggaaaaaccgcuggcuucugcucaaugugaccagcgaggaucuggggaagacauuuuccgucggaaccggcaacugcacaaccaauauucuggaagccaaauacuggugucccgacucuauggaguauaacugcccuaaucucagcccgagagaagaacccgaugacaucgauuguuggugcuacgggguggaaaacguucggguggcuuauggaaagugugacuccgccggccgcucuagacggagccgcagagcgauugaucugccuacacaugagaaucacggccuuaaaacccggcaagagaaguggaugacggggcgcaugggagaaagacagcugcagaagaucgagcggugguucguccgcaaccccuuuuucgcugugaccgcccucacaauugccuaccugguuggcuccaauaugacccagagaguggucaucgcccuucuggugcucgcuguggggccugcuuauagcgcccauugcaucggaauuacagaccgggauuuuaucgaaggcguccacgggggaaccuggguuucugcgacgcuggagcaagacaaaugugugacagugauggcccccgauaagccuucccuggacauuagccucgagaccgucgcuaucgauagaccggccgaagugcgcaaaguuugcuacaacgcugugcugacacaugucaagauuaaugacaaaugucccucuaccggcgaggcccaccuugcggaagagaacgaaggcgacaaugccugcaagcggaccuauuccgauagaggguggggaaacggcugugggcuguucggaaagggcagcaucguggcuugcgccaaauuuacaugcgcuaagucuaugucccucuucgagguugaccagacgaaaauucaguacgugauccgcgcccagcugcacgucggggccaagcaagagaauuggaacaccgauaucaaaacacuuaaguuugacgcucugagcggaucccaggaaguggaguucauuggcuacggcaaagcgacccucgaaugucagguccagacagccguggauuuugggaacucuuauaucgcugagauggaaaccgagagcuggauuguugaccggcaaugggcccaggaucugacgcugccuuggcaguccggaagcggcgggguguggagagagaugcaucaccucgucgaguucgagcccccucaugccgcuacaauccgcgugcuggcccuuggaaaucaagaaggcucucugaagaccgcgcucaccggggcuaugcggguuacaaaggacaccaacgauaauaaccuguacaaacuucacggcggacacguguccugcagagucaagcugagcgcccucacacugaaaggcacgucuuauaagauuuguaccgacaaaauguuuuucgugaagaaucccacagauaccgggcauggaacagugguuaugcaggucaaggugagcaaaggcgccccgugccgcaucccugugaucgucgcugacgaccugaccgccgcuauuaacaaggggauccucgugacgguuaaucccauugccuccaccaacgaugacgaggugcugaucgaagucaauccucccuucggagauucuuacauuaucgugggccggggagacagcagacuuacauaucaguggcacaaagagggcuccagcaucggcagcacccuggggaaggccuucuccacaacgcucaaaggagcucagagacuggccgcgcuuggcgacaccgcuugggauuuugggucuaucggaggcguguucaacagcauugggcgggccguccaccaaguuuuuggaggcgccuuccgcacacuguuuggcgggauguccuggaucacccagggacucaugggcgcucugcuucuguggaugggggugaaugccagagaccggucuauugcucucgccuuccuggcgacaggaggcgugcuggucuuucucgccaccaacgugcaugcuuga

SEQ ID NO: 1605 - RNA, 2076 nt, Artificial Sequence
  derived and/or modified CDS sequence (opt6) from YFV__NC_002031.1__X-SS-prMEdelstem_TM-JEV (polyprotein: aa92-681)
augagaggauuaucaaguagaaaaagaagaucacaugauguacuaaccgugcaauuuuugaucuuagggaugcucuuaaugacaggagguguuacauuaguaagaaagaaucgauggcugcuuuuaaaugugacaucagaggauuuagggaaaacauuuucgguaggaacaggaaauuguacuacaaauauacuugaagcaaaauauuggugcccagacucuauggaauauaauuguccaaauuuaaguccuagagaagaaccugacgauauagauuguugguguuaugguguagaaaauguaagaguagcauacggcaaaugcgauagugcaggacguucuagacguucaaggagagccauagaucugcccacucacgaaaaucacggauugaaaacacgacaagaaaaauggaugacugggcgaaugggagaaagacaacuacagaaaauugaaagaugguucguuagaaauccauucuuugccguaacagcuuuaacaauagccuauuuaguagguaguaauaugacacaaagaguaguaauagcauugcuaguguuagcaguuggaccagcuuauagugcacauugcauaggaauaacagauagagacuuuauagaaggaguacacgggggaacuuggguaagugccacuuuagaacaagauaaauguguuacagugauggcgccagauaaaccaagucuggacauaaguuuggaaacaguagcgauugauagacccgcagaaguaagaaaaguuuguuauaaugcuguucuaacccauguuaaaauaaaugauaaaugcccuagcaccggagaagcccaucuagcagaagaaaaugaaggagauaacgcauguaaacgaacauacucagauagaggauggggcaacggauguggcuuguuuggaaaagguagcauaguagcaugcgcuaaauuuacaugcgcaaagucaaugucauuauuugaaguagaucaaacaaaaauacaauauguaauaagagcucaauuacacgugggugcaaaacaagaaaauuggaauacagacauaaagacacuaaaguucgacgcauuaaguggaucacaagagguagaauuuauaggguacggaaaagcgacuuuagagugucaaguccaaacagcaguagauuucgguaacucauacauagcagaaauggaaacugaaaguuggauaguagauagacaaugggcacaagacuugacacuaccuuggcaaucaggaagcggaggaguauggagagaaaugcaucauuuaguagaauuugaaccaccucaugcagcaacaauaagaguauuagcccuaggaaaccaagaaggaaguuuaaaaacagcacuaacaggagcuaugagaguaacaaaagauacaaaugacaacaaucuauacaaauuacacggaggacauguaagcugccggguaaaguugagcgcacuaacauuaaaaggaacgaguuauaaaauaugcacagauaaaauguucuuuguuaaaaauccuacagauaccggucauggaacaguaguaaugcaaguaaaaguaaguaaaggcgcucccuguagaauaccuguaauagucgcagacgauuuaaccgcagcaauaaauaaaggaauauuagucacgguaaacccaauagcgucaacaaaugaugaugaaguauuaauagaaguuaacccaccuuuuggagacaguuauauaauagucggaaggggugauaguagacuaacauaccaauggcauaaagaaggaagcucaauaggaaguacacuaggaaaagcauuuaguacaacauuaaaaggagcacaaagauuagcagcauuaggagauacagcaugggauuuuggaagcauaggaggaguauuuaauaguauagguagagcaguacaucaaguauuuggaggagcauuuagaacauuauuuggaggaaugaguuggauaacacaaggauuaaugggagcauuauuauuauggaugggaguaaaugcaagagauagaaguauagcauuagcauuuuuagcaacaggaggaguauuaguauuuuuagcaacaaauguacaugcauga

SEQ ID NO: 1606 - RNA, 2049 nt, Artificial Sequence
  derived and/or modified CDS sequence (opt6) from YFV__NC_002031.1__SSjev(V3)-prMEdelstem_TM-JEV (polyprotein: aa122-681)
augaaugaagguucaauuaugugguuggcaucauuagcaguuguaauugcaugugcuggugcaguuacauuaguaagaaagaaucgauggcugcuuuuaaaugugacaucagaggauuuagggaaaacauuuucgguaggaacaggaaauuguacuacaaauauacuugaagcaaaauauuggugcccagacucuauggaauauaauuguccaaauuuaaguccuagagaagaaccugacgauauagauuguugguguuaugguguagaaaauguaagaguagcauacggcaaaugcgauagugcaggacguucuagacguucaaggagagccauagaucugcccacucacgaaaaucacggauugaaaacacgacaagaaaaauggaugacugggcgaaugggagaaagacaacuacagaaaauugaaagaugguucguuagaaauccauucuuugccguaacagcuuuaacaauagccuauuuaguagguaguaauaugacacaaagaguaguaauagcauugcuaguguuagcaguuggaccagcuuauagugcacauugcauaggaauaacagauagagacuuuauagaaggaguacacgggggaacuuggguaagugccacuuuagaacaagauaaauguguuacagugauggcgccagauaaaccaagucuggacauaaguuuggaaacaguagcgauugauagacccgcagaaguaagaaaaguuuguuauaaugcuguucuaacccauguuaaaauaaaugauaaaugcccuagcaccggagaagcccaucuagcagaagaaaaugaaggagauaacgcauguaaacgaacauacucagauagaggauggggcaacggauguggcuuguuuggaaaagguagcauaguagcaugcgcuaaauuuacaugcgcaaagucaaugucauuauuugaaguagaucaaacaaaaauacaauauguaauaagagcucaauuacacgugggugcaaaacaagaaaauuggaauacagacauaaagacacuaaaguucgacgcauuaaguggaucacaagagguagaauuuauaggguacggaaaagcgacuuuagagugucaaguccaaacagcaguagauuucgguaacucauacauagcagaaauggaaacugaaaguuggauaguagauagacaaugggcacaagacuugacacuaccuuggcaaucaggaagcggaggaguauggagagaaaugcaucauuuaguagaauuugaaccaccucaugcagcaacaauaagaguauuagcccuaggaaaccaagaaggaaguuuaaaaacagcacuaacaggagcuaugagaguaacaaaagauacaaaugacaacaaucuauacaaauuacacggaggacauguaagcugccggguaaaguugagcgcacuaacauuaaaaggaacgaguuauaaaauaugcacagauaaaauguucuuuguuaaaaauccuacagauaccggucauggaacaguaguaaugcaaguaaaaguaaguaaaggcgcucccuguagaauaccuguaauagucgcagacgauuuaaccgcagcaauaaauaaaggaauauuagucacgguaaacccaauagcgucaacaaaugaugaugaaguauuaauagaaguuaacccaccuuuuggagacaguuauauaauagucggaaggggugauaguagacuaacauaccaauggcauaaagaaggaagcucaauaggaaguacacuaggaaaagcauuuaguacaacauuaaaaggagcacaaagauuagcagcauuaggagauacagcaugggauuuuggaagcauaggaggaguauuuaauaguauagguagagcaguacaucaaguauuuggaggagcauuuagaacauuauuuggaggaaugaguuggauaacacaaggauuaaugggagcauuauuauuauggaugggaguaaaugcaagagauagaaguauagcauuagcauuuuuagcaacaggaggaguauuaguauuuuuagcaacaaauguacaugcauga

SEQ ID NO: 1607 - RNA, 2076 nt, Artificial Sequence
  derived and/or modified CDS sequence (opt11) from YFV__NC_002031.1__X-SS-prMEdelstem_TM-JEV (polyprotein: aa92-681)
augcggggacuaagcagcagaaaaagacgcagccacgaugugcucaccgugcaauuccucauacuggggaugcuccuaaugaccggaggcgugacccuaguaaggaaaaacagauggcuacuacuaaacguaaccucagaagaucuaggaaagacauuuucagucggcacaggcaacugcacaaccaacauacuagaagcaaaauauuggugcccagacagcauggaauacaacugucccaaccucagcccaagagaggaaccagacgacauagacugcugguguuacggaguagaaaacguaagaguggcauacggcaaaugcgacagcgcaggcaggagccgaagaucccgcagagccaucgacuugcccacgcacgaaaaccacggccucaaaacacgacaagaaaaauggaugacagggcgaaugggagaacgacagcuccagaaaauagaacgaugguucguccggaacccguucuucgcaguaacggcacuaacaaucgcauaccucguaggcagcaacaugacacaaagaguggucaucgcgcuacucguacuagcaguggggcccgcauacagugcacacugcauaggaaucacagaccgugacuucaucgaaggcguacacggaggaacguggguaagcgcgacacuggaacaagacaaaugcgugacaguaauggcaccagacaaaccaagccuagacauaucccuagaaacggucgccaucgaccgucccgcagaaguacgaaagguaugcuauaaugcaguccucacacacgucaaaauaaacgacaaaugccccagcacgggcgaagcacaccucgccgaagaaaacgaaggggauaacgcgugcaaacgcaccuacuccgacaggggauggggcaacggaugcggacuguucggaaaaggauccauagucgcaugcgcaaaauuuaccugcgcaaaaagcaugagcuuguucgagguagaccaaacgaagauccaauacguaauccgagcucaacuacacguuggggccaagcaagagaacuggaauacggacaucaaaacacuaaaauucgacgcacucuccggcucacaagaagucgaguucaucggcuacggcaaagcaacacuagaaugccaaguacaaacagcgguggacuucggcaacagcuacauagcagaaauggaaacagaaagcuggauaguagaccgacaaugggcacaagaccuaacucugccauggcaaagcggcucaggaggaguguggagagagaugcaccaccugguagaguucgaacccccacacgcagcaacaauaaggguacuggcacuaggcaaccaagaaggcagccuaaaaaccgcacucacaggagccaugcgcgugacgaaggacaccaacgacaacaaccucuacaaacuccacggagggcacguauccugccgcguaaaacuaucagcacuaacgcuaaaaggaacaagcuacaaaauaugcacagacaaaauguucuucgucaaaaaccccacagacacaggccacggcacagucguaaugcaagugaaggucagcaagggggcccccugccgaaucccagucauaguggcagacgaccucacggccgccaucaacaaagggauccugguaacagugaacccaauagcaucgaccaacgacgacgaaguccucauagaagugaaucccccguucggcgacagcuacaucaucguaggacgcggcgacucccgacugacguaccaauggcauaaagaaggcagcagcauugggagcacgcucgggaaagcguucucgaccacgcucaagggcgcgcaaaggcucgcggccuugggcgauaccgcgugggauuucgggagcauaggcggggucuuuaacucgaucgggcgcgcgguccaucaaguguucgggggcgcguucaggaccuuguucgggggcaugagcuggaucacgcaagggcucaugggcgcgcucuugcucuggaugggggucaaugccagggacaggagcauagccuuggccuuucucgcgaccgggggcgugcucguguucuuggccacgaacgugcacgcguga

SEQ ID NO: 1608 - RNA, 2049 nt, Artificial Sequence
  derived and/or modified CDS sequence (opt11) from YFV__NC_002031.1__SSjev(V3)-prMEdelstem_TM-JEV (polyprotein: aa122-681)
augaacgagggcucgaucaugugguuggccucgcucgcggucgugaucgcgugcgcgggcgcggugacccuaguaaggaaaaacagauggcuacuacuaaacguaaccucagaagaucuaggaaagacauuuucagucggcacaggcaacugcacaaccaacauacuagaagcaaaauauuggugcccagacagcauggaauacaacugucccaaccucagcccaagagaggaaccagacgacauagacugcugguguuacggaguagaaaacguaagaguggcauacggcaaaugcgacagcgcaggcaggagccgaagaucccgcagagccaucgacuugcccacgcacgaaaaccacggccucaaaacacgacaagaaaaauggaugacagggcgaaugggagaacgacagcuccagaaaauagaacgaugguucguccggaacccguucuucgcaguaacggcacuaacaaucgcauaccucguaggcagcaacaugacacaaagaguggucaucgcgcuacucguacuagcaguggggcccgcauacagugcacacugcauaggaaucacagaccgugacuucaucgaaggcguacacggaggaacguggguaagcgcgacacuggaacaagacaaaugcgugacaguaauggcaccagacaaaccaagccuagacauaucccuagaaacggucgccaucgaccgucccgcagaaguacgaaagguaugcuauaaugcaguccucacacacgucaaaauaaacgacaaaugccccagcacgggcgaagcacaccucgccgaagaaaacgaaggggauaacgcgugcaaacgcaccuacuccgacaggggauggggcaacggaugcggacuguucggaaaaggauccauagucgcaugcgcaaaauuuaccugcgcaaaaagcaugagcuuguucgagguagaccaaacgaagauccaauacguaauccgagcucaacuacacguuggggccaagcaagagaacuggaauacggacaucaaaacacuaaaauucgacgcacucuccggcucacaagaagucgaguucaucggcuacggcaaagcaacacuagaaugccaaguacaaacagcgguggacuucggcaacagcuacauagcagaaauggaaacagaaagcuggauaguagaccgacaaugggcacaagaccuaacucugccauggcaaagcggcucaggaggaguguggagagagaugcaccaccugguagaguucgaacccccacacgcagcaacaauaaggguacuggcacuaggcaaccaagaaggcagccuaaaaaccgcacucacaggagccaugcgcgugacgaaggacaccaacgacaacaaccucuacaaacuccacggagggcacguauccugccgcguaaaacuaucagcacuaacgcuaaaaggaacaagcuacaaaauaugcacagacaaaauguucuucgucaaaaaccccacagacacaggccacggcacagucguaaugcaagugaaggucagcaagggggcccccugccgaaucccagucauaguggcagacgaccucacggccgccaucaacaaagggauccugguaacagugaacccaauagcaucgaccaacgacgacgaaguccucauagaagugaaucccccguucggcgacagcuacaucaucguaggacgcggcgacucccgacugacguaccaauggcauaaagaaggcagcagcauugggagcacgcucgggaaagcguucucgaccacgcucaagggcgcgcaaaggcucgcggccuugggcgauaccgcgugggauuucgggagcauaggcggggucuuuaacucgaucgggcgcgcgguccaucaaguguucgggggcgcguucaggaccuuguucgggggcaugagcuggaucacgcaagggcucaugggcgcgcucuugcucuggaugggggucaaugccagggacaggagcauagccuuggccuuucucgcgaccgggggcgugcucguguucuuggccacgaacgugcacgcguga

SEQ ID NO: 1609 - RNA, 2352 nt, Artificial Sequence
  mRNA product Design a-1 comprising derived and/or modified sequence from YFV__NC_002031.1__X-SS-prMEdelstem_TM-JEV (polyprotein: aa92-681) (wt)
gggagagucccgcagucggcguccagcggcucugcuuguucgugugugugucguugcaggccuuauucaagcuuaccaugagaggauuguccucaaggaaacgccguucccaugauguucugacugugcaauuccuaauuuugggaaugcuguugaugacggguggagugaccuuggugcggaaaaacagaugguugcuccuaaaugugacaucugaggaccucgggaaaacauucucugugggcacaggcaacugcacaacaaacauuuuggaagccaaguacuggugcccagacucaauggaauacaacugucccaaucucaguccaagagaggagccagaugacauugauugcuggugcuaugggguggaaaacguuagagucgcauaugguaagugugacucagcaggcaggucuaggaggucaagaagggccauugacuugccuacgcaugaaaaccaugguuugaagacccggcaagaaaaauggaugacuggaagaaugggugaaaggcaacuccaaaagauugagagaugguucgugaggaaccccuuuuuugcagugacggcucugaccauugccuaccuugugggaagcaacaugacgcaacgagucgugauugcccuacuggucuuggcuguugguccggccuacucagcucacugcauuggaauuacugacagggauuucauugagggggugcauggaggaacuuggguuucagcuacccuggagcaagacaagugugucacuguuauggccccugacaagccuucauuggacaucucacuagagacaguagccauugauagaccugcugaggugaggaaaguguguuacaaugcaguucucacucaugugaagauuaaugacaagugccccagcacuggagaggcccaccuagcugaagagaacgaaggggacaaugcgugcaagcgcacuuauucugauagaggcuggggcaauggcuguggccuauuugggaaagggagcauuguggcaugcgccaaauucacuugugccaaauccaugaguuuguuugagguugaucagaccaaaauucaguaugucaucagagcacaauugcauguaggggccaagcaggaaaauuggaauaccgacauuaagacucucaaguuugaugcccugucaggcucccaggaagucgaguucauuggguauggaaaagcuacacuggaaugccaggugcaaacugcgguggacuuugguaacaguuacaucgcugagauggaaacagagagcuggauaguggacagacagugggcccaggacuugacccugccauggcagaguggaaguggcgggguguggagagagaugcaucaucuugucgaauuugaaccuccgcaugccgccacuaucagaguacuggcccugggaaaccaggaaggcuccuugaaaacagcucuuacuggcgcaaugaggguuacaaaggacacaaaugacaacaaccuuuacaaacuacaugguggacauguuucuugcagagugaaauugucagcuuugacacucaaggggacauccuacaaaauaugcacugacaaaauguuuuuugucaagaacccaacugacacuggccauggcacuguugugaugcaggugaaagugucaaaaggagcccccugcaggauuccagugauaguagcugaugaucuuacagcggcaaucaauaaaggcauuuugguuacaguuaaccccaucgccucaaccaaugaugaugaagugcugauugaggugaacccaccuuuuggagacagcuacauuaucguugggagaggagauucacgucucacuuaccaguggcacaaagagggaagcucaauaggcagcacgcugggcaaggccuuuucaacaacuuugaagggagcucaaagacuggcagcguugggcgacacagccugggacuuuggcucuauuggaggggucuucaacuccauaggaagagccguucaccaaguguuugguggugccuucagaacacucuuugggggaaugucuuggaucacacaagggcuaaugggugcccuacugcucuggaugggcgucaacgcacgagaccgaucaauugcuuuggccuucuuagccacaggaggugugcucguguucuuagcgaccaaugugcacgccuaaggacuagucccuguucccagagcccacuuuuuuuucuuuuuuugaaauaaaauagccugucuuucagaucuaaaaaaaaaaaaaaaaaaaaaaaaaaaaaaaaaaaaaaaaaaaaaaaaaaaaaaaaaaaaaaaaugcaucccccccccccccccccccccccccccccccaaaggcucuuuucagagccaccagaauu

SEQ ID NO: 1610 - RNA, 2325 nt, Artificial Sequence
  mRNA product Design a-1 comprising derived and/or modified sequence from YFV__NC_002031.1__SSjev(V3)-prMEdelstem_TM-JEV (polyprotein: aa122-681) (wt)
gggagagucccgcagucggcguccagcggcucugcuuguucgugugugugucguugcaggccuuauucaagcuuaccaugaaugaaggcucaaucauguggcucgcgagcuuggcaguugucauagcuugugcaggagccgugaccuuggugcggaaaaacagaugguugcuccuaaaugugacaucugaggaccucgggaaaacauucucugugggcacaggcaacugcacaacaaacauuuuggaagccaaguacuggugcccagacucaauggaauacaacugucccaaucucaguccaagagaggagccagaugacauugauugcuggugcuaugggguggaaaacguuagagucgcauaugguaagugugacucagcaggcaggucuaggaggucaagaagggccauugacuugccuacgcaugaaaaccaugguuugaagacccggcaagaaaaauggaugacuggaagaaugggugaaaggcaacuccaaaagauugagagaugguucgugaggaaccccuuuuuugcagugacggcucugaccauugccuaccuugugggaagcaacaugacgcaacgagucgugauugcccuacuggucuuggcuguugguccggccuacucagcucacugcauuggaauuacugacagggauuucauugagggggugcauggaggaacuuggguuucagcuacccuggagcaagacaagugugucacuguuauggccccugacaagccuucauuggacaucucacuagagacaguagccauugauagaccugcugaggugaggaaaguguguuacaaugcaguucucacucaugugaagauuaaugacaagugccccagcacuggagaggcccaccuagcugaagagaacgaaggggacaaugcgugcaagcgcacuuauucugauagaggcuggggcaauggcuguggccuauuugggaaagggagcauuguggcaugcgccaaauucacuugugccaaauccaugaguuuguuugagguugaucagaccaaaauucaguaugucaucagagcacaauugcauguaggggccaagcaggaaaauuggaauaccgacauuaagacucucaaguuugaugcccugucaggcucccaggaagucgaguucauuggguauggaaaagcuacacuggaaugccaggugcaaacugcgguggacuuugguaacaguuacaucgcugagauggaaacagagagcuggauaguggacagacagugggcccaggacuugacccugccauggcagaguggaaguggcgggguguggagagagaugcaucaucuugucgaauuugaaccuccgcaugccgccacuaucagaguacuggcccugggaaaccaggaaggcuccuugaaaacagcucuuacuggcgcaaugaggguuacaaaggacacaaaugacaacaaccuuuacaaacuacaugguggacauguuucuugcagagugaaauugucagcuuugacacucaaggggacauccuacaaaauaugcacugacaaaauguuuuuugucaagaacccaacugacacuggccauggcacuguugugaugcaggugaaagugucaaaaggagcccccugcaggauuccagugauaguagcugaugaucuuacagcggcaaucaauaaaggcauuuugguuacaguuaaccccaucgccucaaccaaugaugaugaagugcugauugaggugaacccaccuuuuggagacagcuacauuaucguugggagaggagauucacgucucacuuaccaguggcacaaagagggaagcucaauaggcagcacgcugggcaaggccuuuucaacaacuuugaagggagcucaaagacuggcagcguugggcgacacagccugggacuuuggcucuauuggaggggucuucaacuccauaggaagagccguucaccaaguguuugguggugccuucagaacacucuuugggggaaugucuuggaucacacaagggcuaaugggugcccuacugcucuggaugggcgucaacgcacgagaccgaucaauugcuuuggccuucuuagccacaggaggugugcucguguucuuagcgaccaaugugcacgccuaaggacuagucccuguucccagagcccacuuuuuuuucuuuuuuugaaauaaaauagccugucuuucagaucuaaaaaaaaaaaaaaaaaaaaaaaaaaaaaaaaaaaaaaaaaaaaaaaaaaaaaaaaaaaaaaaaugcaucccccccccccccccccccccccccccccccaaaggcucuuuucagagccaccagaauu

SEQ ID NO: 1611 - RNA, 2340 nt, Artificial Sequence
  mRNA product Design a-1 comprising derived and/or modified sequence from YFV__NC_002031.1__X-SS-prME (polyprotein: aa92-778) (wt)
gggagagucccgcagucggcguccagcggcucugcuuguucgugugugugucguugcaggccuuauucaagcuuaccaugagaggauuguccucaaggaaacgccguucccaugauguucugacugugcaauuccuaauuuugggaaugcuguugaugacggguggagugaccuuggugcggaaaaacagaugguugcuccuaaaugugacaucugaggaccucgggaaaacauucucugugggcacaggcaacugcacaacaaacauuuuggaagccaaguacuggugcccagacucaauggaauacaacugucccaaucucaguccaagagaggagccagaugacauugauugcuggugcuaugggguggaaaacguuagagucgcauaugguaagugugacucagcaggcaggucuaggaggucaagaagggccauugacuugccuacgcaugaaaaccaugguuugaagacccggcaagaaaaauggaugacuggaagaaugggugaaaggcaacuccaaaagauugagagaugguucgugaggaaccccuuuuuugcagugacggcucugaccauugccuaccuugugggaagcaacaugacgcaacgagucgugauugcccuacuggucuuggcuguugguccggccuacucagcucacugcauuggaauuacugacagggauuucauugagggggugcauggaggaacuuggguuucagcuacccuggagcaagacaagugugucacuguuauggccccugacaagccuucauuggacaucucacuagagacaguagccauugauagaccugcugaggugaggaaaguguguuacaaugcaguucucacucaugugaagauuaaugacaagugccccagcacuggagaggcccaccuagcugaagagaacgaaggggacaaugcgugcaagcgcacuuauucugauagaggcuggggcaauggcuguggccuauuugggaaagggagcauuguggcaugcgccaaauucacuugugccaaauccaugaguuuguuugagguugaucagaccaaaauucaguaugucaucagagcacaauugcauguaggggccaagcaggaaaauuggaauaccgacauuaagacucucaaguuugaugcccugucaggcucccaggaagucgaguucauuggguauggaaaagcuacacuggaaugccaggugcaaacugcgguggacuuugguaacaguuacaucgcugagauggaaacagagagcuggauaguggacagacagugggcccaggacuugacccugccauggcagaguggaaguggcgggguguggagagagaugcaucaucuugucgaauuugaaccuccgcaugccgccacuaucagaguacuggcccugggaaaccaggaaggcuccuugaaaacagcucuuacuggcgcaaugaggguuacaaaggacacaaaugacaacaaccuuuacaaacuacaugguggacauguuucuugcagagugaaauugucagcuuugacacucaaggggacauccuacaaaauaugcacugacaaaauguuuuuugucaagaacccaacugacacuggccauggcacuguugugaugcaggugaaagugucaaaaggagcccccugcaggauuccagugauaguagcugaugaucuuacagcggcaaucaauaaaggcauuuugguuacaguuaaccccaucgccucaaccaaugaugaugaagugcugauugaggugaacccaccuuuuggagacagcuacauuaucguugggagaggagauucacgucucacuuaccaguggcacaaagagggaagcucaauaggaaaguuguucacucagaccaugaaaggcguggaacgccuggccgucaugggagacaccgccugggauuucagcuccgcuggaggguucuucacuucgguugggaaaggaauccauacgguguuuggcucugccuuucaggggcuauuuggcggcuugaacuggauaacaaaggucaucaugggggcgguacuuauauggguuggcaucaacacaagaaacaugacaauguccaugagcaugaucuugguaggagugaucaugauguuuuugucucuaggaguuggggcguaaggacuagucccuguucccagagcccacuuuuuuuucuuuuuuugaaauaaaauagccugucuuucagaucuaaaaaaaaaaaaaaaaaaaaaaaaaaaaaaaaaaaaaaaaaaaaaaaaaaaaaaaaaaaaaaaaugcaucccccccccccccccccccccccccccccccaaaggcucuuuucagagccaccagaauu

SEQ ID NO: 1612 - RNA, 2343 nt, Artificial Sequence
  mRNA product Design a-1 comprising derived and/or modified sequence from YFV__NC_002031.1__SSjev(V3)-prME-XX (polyprotein: aa122-788) (wt)
gggagagucccgcagucggcguccagcggcucugcuuguucgugugugugucguugcaggccuuauucaagcuuaccaugaaugaaggcucaaucauguggcucgcgagcuuggcaguugucauagcuugugcaggagccgugaccuuggugcggaaaaacagaugguugcuccuaaaugugacaucugaggaccucgggaaaacauucucugugggcacaggcaacugcacaacaaacauuuuggaagccaaguacuggugcccagacucaauggaauacaacugucccaaucucaguccaagagaggagccagaugacauugauugcuggugcuaugggguggaaaacguuagagucgcauaugguaagugugacucagcaggcaggucuaggaggucaagaagggccauugacuugccuacgcaugaaaaccaugguuugaagacccggcaagaaaaauggaugacuggaagaaugggugaaaggcaacuccaaaagauugagagaugguucgugaggaaccccuuuuuugcagugacggcucugaccauugccuaccuugugggaagcaacaugacgcaacgagucgugauugcccuacuggucuuggcuguugguccggccuacucagcucacugcauuggaauuacugacagggauuucauugagggggugcauggaggaacuuggguuucagcuacccuggagcaagacaagugugucacuguuauggccccugacaagccuucauuggacaucucacuagagacaguagccauugauagaccugcugaggugaggaaaguguguuacaaugcaguucucacucaugugaagauuaaugacaagugccccagcacuggagaggcccaccuagcugaagagaacgaaggggacaaugcgugcaagcgcacuuauucugauagaggcuggggcaauggcuguggccuauuugggaaagggagcauuguggcaugcgccaaauucacuugugccaaauccaugaguuuguuugagguugaucagaccaaaauucaguaugucaucagagcacaauugcauguaggggccaagcaggaaaauuggaauaccgacauuaagacucucaaguuugaugcccugucaggcucccaggaagucgaguucauuggguauggaaaagcuacacuggaaugccaggugcaaacugcgguggacuuugguaacaguuacaucgcugagauggaaacagagagcuggauaguggacagacagugggcccaggacuugacccugccauggcagaguggaaguggcgggguguggagagagaugcaucaucuugucgaauuugaaccuccgcaugccgccacuaucagaguacuggcccugggaaaccaggaaggcuccuugaaaacagcucuuacuggcgcaaugaggguuacaaaggacacaaaugacaacaaccuuuacaaacuacaugguggacauguuucuugcagagugaaauugucagcuuugacacucaaggggacauccuacaaaauaugcacugacaaaauguuuuuugucaagaacccaacugacacuggccauggcacuguugugaugcaggugaaagugucaaaaggagcccccugcaggauuccagugauaguagcugaugaucuuacagcggcaaucaauaaaggcauuuugguuacaguuaaccccaucgccucaaccaaugaugaugaagugcugauugaggugaacccaccuuuuggagacagcuacauuaucguugggagaggagauucacgucucacuuaccaguggcacaaagagggaagcucaauaggaaaguuguucacucagaccaugaaaggcguggaacgccuggccgucaugggagacaccgccugggauuucagcuccgcuggaggguucuucacuucgguugggaaaggaauccauacgguguuuggcucugccuuucaggggcuauuuggcggcuugaacuggauaacaaaggucaucaugggggcgguacuuauauggguuggcaucaacacaagaaacaugacaauguccaugagcaugaucuugguaggagugaucaugauguuuuugucucuaggaguuggggcggaucaaggaugcgccaucaacuuuggcaaguaaggacuagucccuguucccagagcccacuuuuuuuucuuuuuuugaaauaaaauagccugucuuucagaucuaaaaaaaaaaaaaaaaaaaaaaaaaaaaaaaaaaaaaaaaaaaaaaaaaaaaaaaaaaaaaaaaugcaucccccccccccccccccccccccccccccccaaaggcucuuuucagagccaccagaauu

SEQ ID NO: 1613 - RNA, 2352 nt, Artificial Sequence
  mRNA product Design a-1 comprising derived and/or modified sequence from YFV__NC_002031.1__X-SS-prMEdelstem_TM-JEV (polyprotein: aa92-681) (opt1)
gggagagucccgcagucggcguccagcggcucugcuuguucgugugugugucguugcaggccuuauucaagcuuaccaugcggggccugagcucccgcaagcggcgcagccacgacgugcucaccguccaguuccugauccuggggaugcuccugaugaccggcggggugacgcuggugcggaagaaccgcuggcuccugcugaacgucaccuccgaggaccucggcaagaccuucagcguggggaccggcaacugcacgaccaacauccuggaggccaaguacuggugccccgacuccauggaguacaacugcccgaaccugagcccccgggaggagcccgacgacaucgacugcuggugcuacggcguggagaacguccgcguggccuacgggaagugcgacuccgcgggccggagccgccggucccgccgggccaucgaccuccccacccacgagaaccacgggcugaagacccgccaggagaaguggaugacgggccggaugggggagcgccagcugcagaagaucgagcggugguucgugcgcaacccguucuucgccgucaccgcccucaccaucgccuaccuggugggcagcaacaugacccagcggguggucaucgcgcugcucgugcuggccgugggccccgccuacuccgcccacugcaucgggaucacggaccgcgacuucaucgagggcguccacgggggcaccugggugagcgcgacccuggagcaggacaagugcgugaccgucauggcccccgacaagcccucccucgacaucagccuggagacgguggccaucgaccggccggccgaggugcgcaaggucugcuacaacgccgugcugacccacgugaagaucaacgacaagugccccuccaccggcgaggcgcaccucgccgaggagaacgagggggacaacgccugcaagcggaccuacagcgaccggggcugggggaacggcugcgggcuguucggcaagggcuccaucgucgccugcgccaaguucacgugcgcgaagagcaugucccuguucgagguggaccagaccaagauccaguacgucauccgcgcccagcuccacgugggggccaagcaggagaacuggaacaccgacaucaagacccugaaguucgacgcccugagcggcagccaggagguggaguucaucggguacggcaaggccacgcucgagugccagguccagaccgcgguggacuucgggaacuccuacaucgccgagauggagaccgagagcuggaucguggaccggcagugggcccaggaccugacccugcccuggcaguccggcagcggcggggucuggcgcgagaugcaccaccucguggaguucgagcccccgcacgccgccacgauccgggugcuggcgcugggcaaccaggaggggucccucaagaccgcccugaccggcgccaugcgcgucaccaaggacacgaacgacaacaaccuguacaagcuccacgggggccacgugagcugccgggugaagcuguccgcccugacccucaagggcaccagcuacaagaucugcaccgacaagauguucuucgucaagaaccccacggacaccgggcacggcaccguggugaugcaggucaagguguccaagggggcgcccugccgcaucccggugaucgucgccgacgaccugaccgccgccaucaacaagggcauccuggugaccgugaacccgaucgccagcacgaacgacgacgagguccucaucgaggugaacccccccuucggcgacuccuacaucaucguggggcggggcgacagccgccugaccuaccaguggcacaaggagggguccagcaucggcagcacccuggggaaggccuucuccaccacgcucaagggcgcccagcgccuggcggcccugggggacaccgccugggacuucggcagcaucgggggcguguucaacuccaucggccgggccguccaccagguguucgggggcgccuuccgcacccucuucgggggcaugagcuggaucacccaggggcugaugggcgcgcugcuccuguggaugggggugaacgcccgggaccgcuccaucgcccuggccuuccucgcgacgggcggcguccugguguuccuggccaccaacgugcacgccugaggacuagucccuguucccagagcccacuuuuuuuucuuuuuuugaaauaaaauagccugucuuucagaucuaaaaaaaaaaaaaaaaaaaaaaaaaaaaaaaaaaaaaaaaaaaaaaaaaaaaaaaaaaaaaaaaugcaucccccccccccccccccccccccccccccccaaaggcucuuuucagagccaccagaauu

SEQ ID NO: 1614 - RNA, 2325 nt, Artificial Sequence
  mRNA product Design a-1 comprising derived and/or modified sequence from YFV__NC_002031.1__SSjev(V3)-prMEdelstem_TM-JEV (polyprotein: aa122-681) (opt1)
gggagagucccgcagucggcguccagcggcucugcuuguucgugugugugucguugcaggccuuauucaagcuuaccaugaacgagggcagcaucauguggcuggccucccucgccguggucaucgcgugcgccggggccgugacgcuggugcggaagaaccgcuggcuccugcugaacgucaccuccgaggaccucggcaagaccuucagcguggggaccggcaacugcacgaccaacauccuggaggccaaguacuggugccccgacuccauggaguacaacugcccgaaccugagcccccgggaggagcccgacgacaucgacugcuggugcuacggcguggagaacguccgcguggccuacgggaagugcgacuccgcgggccggagccgccggucccgccgggccaucgaccuccccacccacgagaaccacgggcugaagacccgccaggagaaguggaugacgggccggaugggggagcgccagcugcagaagaucgagcggugguucgugcgcaacccguucuucgccgucaccgcccucaccaucgccuaccuggugggcagcaacaugacccagcggguggucaucgcgcugcucgugcuggccgugggccccgccuacuccgcccacugcaucgggaucacggaccgcgacuucaucgagggcguccacgggggcaccugggugagcgcgacccuggagcaggacaagugcgugaccgucauggcccccgacaagcccucccucgacaucagccuggagacgguggccaucgaccggccggccgaggugcgcaaggucugcuacaacgccgugcugacccacgugaagaucaacgacaagugccccuccaccggcgaggcgcaccucgccgaggagaacgagggggacaacgccugcaagcggaccuacagcgaccggggcugggggaacggcugcgggcuguucggcaagggcuccaucgucgccugcgccaaguucacgugcgcgaagagcaugucccuguucgagguggaccagaccaagauccaguacgucauccgcgcccagcuccacgugggggccaagcaggagaacuggaacaccgacaucaagacccugaaguucgacgcccugagcggcagccaggagguggaguucaucggguacggcaaggccacgcucgagugccagguccagaccgcgguggacuucgggaacuccuacaucgccgagauggagaccgagagcuggaucguggaccggcagugggcccaggaccugacccugcccuggcaguccggcagcggcggggucuggcgcgagaugcaccaccucguggaguucgagcccccgcacgccgccacgauccgggugcuggcgcugggcaaccaggaggggucccucaagaccgcccugaccggcgccaugcgcgucaccaaggacacgaacgacaacaaccuguacaagcuccacgggggccacgugagcugccgggugaagcuguccgcccugacccucaagggcaccagcuacaagaucugcaccgacaagauguucuucgucaagaaccccacggacaccgggcacggcaccguggugaugcaggucaagguguccaagggggcgcccugccgcaucccggugaucgucgccgacgaccugaccgccgccaucaacaagggcauccuggugaccgugaacccgaucgccagcacgaacgacgacgagguccucaucgaggugaacccccccuucggcgacuccuacaucaucguggggcggggcgacagccgccugaccuaccaguggcacaaggagggguccagcaucggcagcacccuggggaaggccuucuccaccacgcucaagggcgcccagcgccuggcggcccugggggacaccgccugggacuucggcagcaucgggggcguguucaacuccaucggccgggccguccaccagguguucgggggcgccuuccgcacccucuucgggggcaugagcuggaucacccaggggcugaugggcgcgcugcuccuguggaugggggugaacgcccgggaccgcuccaucgcccuggccuuccucgcgacgggcggcguccugguguuccuggccaccaacgugcacgccugaggacuagucccuguucccagagcccacuuuuuuuucuuuuuuugaaauaaaauagccugucuuucagaucuaaaaaaaaaaaaaaaaaaaaaaaaaaaaaaaaaaaaaaaaaaaaaaaaaaaaaaaaaaaaaaaaugcaucccccccccccccccccccccccccccccccaaaggcucuuuucagagccaccagaauu

SEQ ID NO: 1615 - RNA, 2340 nt, Artificial Sequence
  mRNA product Design a-1 comprising derived and/or modified sequence from YFV__NC_002031.1__X-SS-prME (polyprotein: aa92-778) (opt1)
gggagagucccgcagucggcguccagcggcucugcuuguucgugugugugucguugcaggccuuauucaagcuuaccaugcggggccugagcucccgcaagcggcgcagccacgacgugcucaccguccaguuccugauccuggggaugcuccugaugaccggcggggugacgcuggugcggaagaaccgcuggcuccugcugaacgucaccuccgaggaccucggcaagaccuucagcguggggaccggcaacugcacgaccaacauccuggaggccaaguacuggugccccgacuccauggaguacaacugcccgaaccugagcccccgggaggagcccgacgacaucgacugcuggugcuacggcguggagaacguccgcguggccuacgggaagugcgacuccgcgggccggagccgccggucccgccgggccaucgaccuccccacccacgagaaccacgggcugaagacccgccaggagaaguggaugacgggccggaugggggagcgccagcugcagaagaucgagcggugguucgugcgcaacccguucuucgccgucaccgcccucaccaucgccuaccuggugggcagcaacaugacccagcggguggucaucgcgcugcucgugcuggccgugggccccgccuacuccgcccacugcaucgggaucacggaccgcgacuucaucgagggcguccacgggggcaccugggugagcgcgacccuggagcaggacaagugcgugaccgucauggcccccgacaagcccucccucgacaucagccuggagacgguggccaucgaccggccggccgaggugcgcaaggucugcuacaacgccgugcugacccacgugaagaucaacgacaagugccccuccaccggcgaggcgcaccucgccgaggagaacgagggggacaacgccugcaagcggaccuacagcgaccggggcugggggaacggcugcgggcuguucggcaagggcuccaucgucgccugcgccaaguucacgugcgcgaagagcaugucccuguucgagguggaccagaccaagauccaguacgucauccgcgcccagcuccacgugggggccaagcaggagaacuggaacaccgacaucaagacccugaaguucgacgcccugagcggcagccaggagguggaguucaucggguacggcaaggccacgcucgagugccagguccagaccgcgguggacuucgggaacuccuacaucgccgagauggagaccgagagcuggaucguggaccggcagugggcccaggaccugacccugcccuggcaguccggcagcggcggggucuggcgcgagaugcaccaccucguggaguucgagcccccgcacgccgccacgauccgggugcuggcgcugggcaaccaggaggggucccucaagaccgcccugaccggcgccaugcgcgucaccaaggacacgaacgacaacaaccuguacaagcuccacgggggccacgugagcugccgggugaagcuguccgcccugacccucaagggcaccagcuacaagaucugcaccgacaagauguucuucgucaagaaccccacggacaccgggcacggcaccguggugaugcaggucaagguguccaagggggcgcccugccgcaucccggugaucgucgccgacgaccugaccgccgccaucaacaagggcauccuggugaccgugaacccgaucgccagcacgaacgacgacgagguccucaucgaggugaacccccccuucggcgacuccuacaucaucguggggcggggcgacagccgccugaccuaccaguggcacaaggagggguccagcaucggcaagcuguucacccagaccaugaagggggucgagcggcuggcggugaugggcgacacggccugggacuucuccagcgccggcggguucuucaccuccgugggcaaggggauccacaccgucuucggcagcgccuuccaggggcucuucggcggccugaacuggaucaccaaggugaucaugggggccgugcugaucugggucggcaucaacacgcgcaacaugaccauguccaugagcaugauccucgugggggugaucaugauguuccugagccugggcgucggggcgugaggacuagucccuguucccagagcccacuuuuuuuucuuuuuuugaaauaaaauagccugucuuucagaucuaaaaaaaaaaaaaaaaaaaaaaaaaaaaaaaaaaaaaaaaaaaaaaaaaaaaaaaaaaaaaaaaugcaucccccccccccccccccccccccccccccccaaaggcucuuuucagagccaccagaauu

SEQ ID NO: 1616 - RNA, 2343 nt, Artificial Sequence
  mRNA product Design a-1 comprising derived and/or modified sequence from YFV__NC_002031.1__SSjev(V3)-prME-XX (polyprotein: aa122-788) (opt1)
gggagagucccgcagucggcguccagcggcucugcuuguucgugugugugucguugcaggccuuauucaagcuuaccaugaacgagggcagcaucauguggcuggccucccucgccguggucaucgcgugcgccggggccgugacgcuggugcggaagaaccgcuggcuccugcugaacgucaccuccgaggaccucggcaagaccuucagcguggggaccggcaacugcacgaccaacauccuggaggccaaguacuggugccccgacuccauggaguacaacugcccgaaccugagcccccgggaggagcccgacgacaucgacugcuggugcuacggcguggagaacguccgcguggccuacgggaagugcgacuccgcgggccggagccgccggucccgccgggccaucgaccuccccacccacgagaaccacgggcugaagacccgccaggagaaguggaugacgggccggaugggggagcgccagcugcagaagaucgagcggugguucgugcgcaacccguucuucgccgucaccgcccucaccaucgccuaccuggugggcagcaacaugacccagcggguggucaucgcgcugcucgugcuggccgugggccccgccuacuccgcccacugcaucgggaucacggaccgcgacuucaucgagggcguccacgggggcaccugggugagcgcgacccuggagcaggacaagugcgugaccgucauggcccccgacaagcccucccucgacaucagccuggagacgguggccaucgaccggccggccgaggugcgcaaggucugcuacaacgccgugcugacccacgugaagaucaacgacaagugccccuccaccggcgaggcgcaccucgccgaggagaacgagggggacaacgccugcaagcggaccuacagcgaccggggcugggggaacggcugcgggcuguucggcaagggcuccaucgucgccugcgccaaguucacgugcgcgaagagcaugucccuguucgagguggaccagaccaagauccaguacgucauccgcgcccagcuccacgugggggccaagcaggagaacuggaacaccgacaucaagacccugaaguucgacgcccugagcggcagccaggagguggaguucaucggguacggcaaggccacgcucgagugccagguccagaccgcgguggacuucgggaacuccuacaucgccgagauggagaccgagagcuggaucguggaccggcagugggcccaggaccugacccugcccuggcaguccggcagcggcggggucuggcgcgagaugcaccaccucguggaguucgagcccccgcacgccgccacgauccgggugcuggcgcugggcaaccaggaggggucccucaagaccgcccugaccggcgccaugcgcgucaccaaggacacgaacgacaacaaccuguacaagcuccacgggggccacgugagcugccgggugaagcuguccgcccugacccucaagggcaccagcuacaagaucugcaccgacaagauguucuucgucaagaaccccacggacaccgggcacggcaccguggugaugcaggucaagguguccaagggggcgcccugccgcaucccggugaucgucgccgacgaccugaccgccgccaucaacaagggcauccuggugaccgugaacccgaucgccagcacgaacgacgacgagguccucaucgaggugaacccccccuucggcgacuccuacaucaucguggggcggggcgacagccgccugaccuaccaguggcacaaggagggguccagcaucggcaagcuguucacccagaccaugaagggggucgagcggcuggcggugaugggcgacacggccugggacuucuccagcgccggcggguucuucaccuccgugggcaaggggauccacaccgucuucggcagcgccuuccaggggcucuucggcggccugaacuggaucaccaaggugaucaugggggccgugcugaucugggucggcaucaacacgcgcaacaugaccauguccaugagcaugauccucgugggggugaucaugauguuccugagccugggcgucggggcggaccagggcugcgccaucaacuucggcaagugaggacuagucccuguucccagagcccacuuuuuuuucuuuuuuugaaauaaaauagccugucuuucagaucuaaaaaaaaaaaaaaaaaaaaaaaaaaaaaaaaaaaaaaaaaaaaaaaaaaaaaaaaaaaaaaaaugcaucccccccccccccccccccccccccccccccaaaggcucuuuucagagccaccagaauu

SEQ ID NO: 1617 - RNA, 2352 nt, Artificial Sequence
  mRNA product Design a-1 comprising derived and/or modified sequence from YFV__NC_002031.1__X-SS-prMEdelstem_TM-JEV (polyprotein: aa92-681) (opt1)
gggagagucccgcagucggcguccagcggcucugcuuguucgugugugugucguugcaggccuuauucaagcuuaccaugcggggccugagcucccgcaagcggcgcagccacgacgugcucaccguccaguuccugauccuggggaugcuccugaugaccggcggggugacgcuggugcggaagaaccgcuggcuccugcugaacgucaccuccgaggaccucggcaagaccuucagcguggggaccggcaacugcacgaccaacauccuggaggccaaguacuggugccccgacuccauggaguacaacugcccgaaccugagcccccgggaggagcccgacgacaucgacugcuggugcuacggcguggagaacguccgcguggccuacgggaagugcgacuccgcgggccggagccgccggucccgccgggccaucgaccuccccacccacgagaaccacgggcugaagacccgccaggagaaguggaugacgggccggaugggggagcgccagcugcagaagaucgagcggugguucgugcgcaacccguucuucgccgucaccgcccucaccaucgccuaccuggugggcagcaacaugacccagcggguggucaucgcgcugcucgugcuggccgugggccccgccuacuccgcccacugcaucgggaucacggaccgcgacuucaucgagggcguccacgggggcaccugggugagcgcgacccuggagcaggacaagugcgugaccgucauggcccccgacaagcccucccucgacaucagccuggagacgguggccaucgaccggccggccgaggugcgcaaggucugcuacaacgccgugcugacccacgugaagaucaacgacaagugccccuccaccggcgaggcgcaccucgccgaggagaacgagggggacaacgccugcaagcggaccuacagcgaccggggcugggggaacggcugcgggcuguucggcaagggcuccaucgucgccugcgccaaguucacgugcgcgaaguccaugagccuguucgagguggaccagaccaagauccaguacgucauccgcgcccagcuccacgugggggccaagcaggagaacuggaacaccgacaucaagacccugaaguucgacgcccugagcggcagccaggagguggaguucaucggguacggcaaggccacgcucgagugccagguccagaccgcgguggacuucgggaacuccuacaucgccgagauggagaccgagagcuggaucguggaccggcagugggcccaggaccugacccugcccuggcaguccggcagcggcggggucuggcgcgagaugcaccaccucguggaguucgagcccccgcacgccgccacgauccgggugcuggcgcugggcaaccaggaggggucccucaagaccgcccugaccggcgccaugcgcgucaccaaggacacgaacgacaacaaccuguacaagcuccacgggggccacgugagcugccgggugaagcuguccgcccugacccucaagggcaccagcuacaagaucugcaccgacaagauguucuucgucaagaaccccacggacaccgggcacggcaccguggugaugcaggucaagguguccaagggggcgcccugccgcaucccggugaucgucgccgacgaccugaccgccgccaucaacaagggcauccuggugaccgugaacccgaucgccagcacgaacgacgacgagguccucaucgaggugaacccccccuucggcgacuccuacaucaucguggggcggggcgacagccgccugaccuaccaguggcacaaggagggguccagcaucggcagcacccuggggaaggccuucuccaccacgcucaagggcgcccagcgccuggcggcccugggggacaccgccugggacuucggcagcaucgggggcguguucaacuccaucggccgggccguccaccagguguucgggggcgccuuccgcacccucuucgggggcaugagcuggaucacccaggggcugaugggcgcgcugcuccuguggaugggggugaacgcccgggaccgcuccaucgcccuggccuuccucgcgacgggcggcguccugguguuccuggccaccaacgugcacgccugaggacuagucccuguucccagagcccacuuuuuuuucuuuuuuugaaauaaaauagccugucuuucagaucuaaaaaaaaaaaaaaaaaaaaaaaaaaaaaaaaaaaaaaaaaaaaaaaaaaaaaaaaaaaaaaaaugcaucccccccccccccccccccccccccccccccaaaggcucuuuucagagccaccagaauu

SEQ ID NO: 1618 - RNA, 2325 nt, Artificial Sequence
  mRNA product Design a-1 comprising derived and/or modified sequence from YFV__NC_002031.1__SSjev(V3)-prMEdelstem_TM-JEV (polyprotein: aa122-681) (opt1)
gggagagucccgcagucggcguccagcggcucugcuuguucgugugugugucguugcaggccuuauucaagcuuaccaugaacgagggcagcaucauguggcuggccucccucgccguggucaucgcgugcgccggggccgugacgcuggugcggaagaaccgcuggcuccugcugaacgucaccuccgaggaccucggcaagaccuucagcguggggaccggcaacugcacgaccaacauccuggaggccaaguacuggugccccgacuccauggaguacaacugcccgaaccugagcccccgggaggagcccgacgacaucgacugcuggugcuacggcguggagaacguccgcguggccuacgggaagugcgacuccgcgggccggagccgccggucccgccgggccaucgaccuccccacccacgagaaccacgggcugaagacccgccaggagaaguggaugacgggccggaugggggagcgccagcugcagaagaucgagcggugguucgugcgcaacccguucuucgccgucaccgcccucaccaucgccuaccuggugggcagcaacaugacccagcggguggucaucgcgcugcucgugcuggccgugggccccgccuacuccgcccacugcaucgggaucacggaccgcgacuucaucgagggcguccacgggggcaccugggugagcgcgacccuggagcaggacaagugcgugaccgucauggcccccgacaagcccucccucgacaucagccuggagacgguggccaucgaccggccggccgaggugcgcaaggucugcuacaacgccgugcugacccacgugaagaucaacgacaagugccccuccaccggcgaggcgcaccucgccgaggagaacgagggggacaacgccugcaagcggaccuacagcgaccggggcugggggaacggcugcgggcuguucggcaagggcuccaucgucgccugcgccaaguucacgugcgcgaaguccaugagccuguucgagguggaccagaccaagauccaguacgucauccgcgcccagcuccacgugggggccaagcaggagaacuggaacaccgacaucaagacccugaaguucgacgcccugagcggcagccaggagguggaguucaucggguacggcaaggccacgcucgagugccagguccagaccgcgguggacuucgggaacuccuacaucgccgagauggagaccgagagcuggaucguggaccggcagugggcccaggaccugacccugcccuggcaguccggcagcggcggggucuggcgcgagaugcaccaccucguggaguucgagcccccgcacgccgccacgauccgggugcuggcgcugggcaaccaggaggggucccucaagaccgcccugaccggcgccaugcgcgucaccaaggacacgaacgacaacaaccuguacaagcuccacgggggccacgugagcugccgggugaagcuguccgcccugacccucaagggcaccagcuacaagaucugcaccgacaagauguucuucgucaagaaccccacggacaccgggcacggcaccguggugaugcaggucaagguguccaagggggcgcccugccgcaucccggugaucgucgccgacgaccugaccgccgccaucaacaagggcauccuggugaccgugaacccgaucgccagcacgaacgacgacgagguccucaucgaggugaacccccccuucggcgacuccuacaucaucguggggcggggcgacagccgccugaccuaccaguggcacaaggagggguccagcaucggcagcacccuggggaaggccuucuccaccacgcucaagggcgcccagcgccuggcggcccugggggacaccgccugggacuucggcagcaucgggggcguguucaacuccaucggccgggccguccaccagguguucgggggcgccuuccgcacccucuucgggggcaugagcuggaucacccaggggcugaugggcgcgcugcuccuguggaugggggugaacgcccgggaccgcuccaucgcccuggccuuccucgcgacgggcggcguccugguguuccuggccaccaacgugcacgccugaggacuagucccuguucccagagcccacuuuuuuuucuuuuuuugaaauaaaauagccugucuuucagaucuaaaaaaaaaaaaaaaaaaaaaaaaaaaaaaaaaaaaaaaaaaaaaaaaaaaaaaaaaaaaaaaaugcaucccccccccccccccccccccccccccccccaaaggcucuuuucagagccaccagaauu

SEQ ID NO: 1619 - RNA, 2340 nt, Artificial Sequence
  mRNA product Design a-1 comprising derived and/or modified sequence from YFV__NC_002031.1__X-SS-prME (polyprotein: aa92-778) (opt1)
gggagagucccgcagucggcguccagcggcucugcuuguucgugugugugucguugcaggccuuauucaagcuuaccaugcggggccugagcucccgcaagcggcgcagccacgacgugcucaccguccaguuccugauccuggggaugcuccugaugaccggcggggugacgcuggugcggaagaaccgcuggcuccugcugaacgucaccuccgaggaccucggcaagaccuucagcguggggaccggcaacugcacgaccaacauccuggaggccaaguacuggugccccgacuccauggaguacaacugcccgaaccugagcccccgggaggagcccgacgacaucgacugcuggugcuacggcguggagaacguccgcguggccuacgggaagugcgacuccgcgggccggagccgccggucccgccgggccaucgaccuccccacccacgagaaccacgggcugaagacccgccaggagaaguggaugacgggccggaugggggagcgccagcugcagaagaucgagcggugguucgugcgcaacccguucuucgccgucaccgcccucaccaucgccuaccuggugggcagcaacaugacccagcggguggucaucgcgcugcucgugcuggccgugggccccgccuacuccgcccacugcaucgggaucacggaccgcgacuucaucgagggcguccacgggggcaccugggugagcgcgacccuggagcaggacaagugcgugaccgucauggcccccgacaagcccucccucgacaucagccuggagacgguggccaucgaccggccggccgaggugcgcaaggucugcuacaacgccgugcugacccacgugaagaucaacgacaagugccccuccaccggcgaggcgcaccucgccgaggagaacgagggggacaacgccugcaagcggaccuacagcgaccggggcugggggaacggcugcgggcuguucggcaagggcuccaucgucgccugcgccaaguucacgugcgcgaaguccaugagccuguucgagguggaccagaccaagauccaguacgucauccgcgcccagcuccacgugggggccaagcaggagaacuggaacaccgacaucaagacccugaaguucgacgcccugagcggcagccaggagguggaguucaucggguacggcaaggccacgcucgagugccagguccagaccgcgguggacuucgggaacuccuacaucgccgagauggagaccgagagcuggaucguggaccggcagugggcccaggaccugacccugcccuggcaguccggcagcggcggggucuggcgcgagaugcaccaccucguggaguucgagcccccgcacgccgccacgauccgggugcuggcgcugggcaaccaggaggggucccucaagaccgcccugaccggcgccaugcgcgucaccaaggacacgaacgacaacaaccuguacaagcuccacgggggccacgugagcugccgggugaagcuguccgcccugacccucaagggcaccagcuacaagaucugcaccgacaagauguucuucgucaagaaccccacggacaccgggcacggcaccguggugaugcaggucaagguguccaagggggcgcccugccgcaucccggugaucgucgccgacgaccugaccgccgccaucaacaagggcauccuggugaccgugaacccgaucgccagcacgaacgacgacgagguccucaucgaggugaacccccccuucggcgacuccuacaucaucguggggcggggcgacagccgccugaccuaccaguggcacaaggagggguccagcaucggcaagcuguucacccagaccaugaagggggucgagcggcuggcggugaugggcgacacggccugggacuucuccagcgccggcggguucuucaccuccgugggcaaggggauccacaccgucuucggcagcgccuuccaggggcuguucggcggccucaacuggaucaccaaggugaucaugggggccgugcugaucugggucggcaucaacacgcgcaacaugaccauguccaugagcaugauccucgugggggugaucaugauguuccugagccugggcgucggggcgugaggacuagucccuguucccagagcccacuuuuuuuucuuuuuuugaaauaaaauagccugucuuucagaucuaaaaaaaaaaaaaaaaaaaaaaaaaaaaaaaaaaaaaaaaaaaaaaaaaaaaaaaaaaaaaaaaugcaucccccccccccccccccccccccccccccccaaaggcucuuuucagagccaccagaauu

SEQ ID NO: 1620 - RNA, 2343 nt, Artificial Sequence
  mRNA product Design a-1 comprising derived and/or modified sequence from YFV__NC_002031.1__SSjev(V3)-prME-XX (polyprotein: aa122-788) (opt1)
gggagagucccgcagucggcguccagcggcucugcuuguucgugugugugucguugcaggccuuauucaagcuuaccaugaacgagggcagcaucauguggcuggccucccucgccguggucaucgcgugcgccggggccgugacgcuggugcggaagaaccgcuggcuccugcugaacgucaccuccgaggaccucggcaagaccuucagcguggggaccggcaacugcacgaccaacauccuggaggccaaguacuggugccccgacuccauggaguacaacugcccgaaccugagcccccgggaggagcccgacgacaucgacugcuggugcuacggcguggagaacguccgcguggccuacgggaagugcgacuccgcgggccggagccgccggucccgccgggccaucgaccuccccacccacgagaaccacgggcugaagacccgccaggagaaguggaugacgggccggaugggggagcgccagcugcagaagaucgagcggugguucgugcgcaacccguucuucgccgucaccgcccucaccaucgccuaccuggugggcagcaacaugacccagcggguggucaucgcgcugcucgugcuggccgugggccccgccuacuccgcccacugcaucgggaucacggaccgcgacuucaucgagggcguccacgggggcaccugggugagcgcgacccuggagcaggacaagugcgugaccgucauggcccccgacaagcccucccucgacaucagccuggagacgguggccaucgaccggccggccgaggugcgcaaggucugcuacaacgccgugcugacccacgugaagaucaacgacaagugccccuccaccggcgaggcgcaccucgccgaggagaacgagggggacaacgccugcaagcggaccuacagcgaccggggcugggggaacggcugcgggcuguucggcaagggcuccaucgucgccugcgccaaguucacgugcgcgaaguccaugagccuguucgagguggaccagaccaagauccaguacgucauccgcgcccagcuccacgugggggccaagcaggagaacuggaacaccgacaucaagacccugaaguucgacgcccugagcggcagccaggagguggaguucaucggguacggcaaggccacgcucgagugccagguccagaccgcgguggacuucgggaacuccuacaucgccgagauggagaccgagagcuggaucguggaccggcagugggcccaggaccugacccugcccuggcaguccggcagcggcggggucuggcgcgagaugcaccaccucguggaguucgagcccccgcacgccgccacgauccgggugcuggcgcugggcaaccaggaggggucccucaagaccgcccugaccggcgccaugcgcgucaccaaggacacgaacgacaacaaccuguacaagcuccacgggggccacgugagcugccgggugaagcuguccgcccugacccucaagggcaccagcuacaagaucugcaccgacaagauguucuucgucaagaaccccacggacaccgggcacggcaccguggugaugcaggucaagguguccaagggggcgcccugccgcaucccggugaucgucgccgacgaccugaccgccgccaucaacaagggcauccuggugaccgugaacccgaucgccagcacgaacgacgacgagguccucaucgaggugaacccccccuucggcgacuccuacaucaucguggggcggggcgacagccgccugaccuaccaguggcacaaggagggguccagcaucggcaagcuguucacccagaccaugaagggggucgagcggcuggcggugaugggcgacacggccugggacuucuccagcgccggcggguucuucaccuccgugggcaaggggauccacaccgucuucggcagcgccuuccaggggcuguucggcggccucaacuggaucaccaaggugaucaugggggccgugcugaucugggucggcaucaacacgcgcaacaugaccauguccaugagcaugauccucgugggggugaucaugauguuccugagccugggcgucggggcggaccagggcugcgccaucaacuucggcaagugaggacuagucccuguucccagagcccacuuuuuuuucuuuuuuugaaauaaaauagccugucuuucagaucuaaaaaaaaaaaaaaaaaaaaaaaaaaaaaaaaaaaaaaaaaaaaaaaaaaaaaaaaaaaaaaaaugcaucccccccccccccccccccccccccccccccaaaggcucuuuucagagccaccagaauu

SEQ ID NO: 1621 - RNA, 2352 nt, Artificial Sequence
  mRNA product Design a-1 comprising derived and/or modified sequence from YFV__NC_002031.1__X-SS-prMEdelstem_TM-JEV (polyprotein: aa92-681) (opt1)
gggagagucccgcagucggcguccagcggcucugcuuguucgugugugugucguugcaggccuuauucaagcuuaccaugcggggccugagcucccgcaagcggcgcagccacgacgugcucaccguccaguuccugauccuggggaugcuccugaugaccggcggggugacgcuggugcggaagaaccgcuggcuccugcugaacgucaccuccgaggaccucggcaagaccuucagcguggggaccggcaacugcacgaccaacauccuggaggccaaguacuggugccccgacuccauggaguacaacugccccaaccugagcccccgggaggagcccgacgacaucgacugcuggugcuacggcguggagaacguccgcguggccuacgggaagugcgacuccgcgggccggagccgccggucccgccgggccaucgaccuccccacccacgagaaccacgggcugaagacccgccaggagaaguggaugacgggccggaugggggagcgccagcugcagaagaucgagcggugguucgugcgcaacccguucuucgccgucaccgcccucaccaucgccuaccuggugggcagcaacaugacccagcggguggucaucgcgcugcucgugcuggccgugggccccgccuacuccgcccacugcaucgggaucacggaccgcgacuucaucgagggcguccacgggggcaccugggugagcgcgacccuggagcaggacaagugcgugaccgucauggcccccgacaagcccucccucgacaucagccuggagacgguggccaucgaccggccggccgaggugcgcaaggucugcuacaacgccgugcugacccacgugaagaucaacgacaagugccccuccaccggcgaggcgcaccucgccgaggagaacgagggggacaacgccugcaagcggaccuacagcgaccggggcugggggaacggcugcgggcuguucggcaagggcuccaucgucgccugcgccaaguucacgugcgcgaaguccaugagccuguucgagguggaccagaccaagauccaguacgucauccgcgcccagcuccacgugggggccaagcaggagaacuggaacaccgacaucaagacccugaaguucgacgcccugagcggcagccaggagguggaguucaucggguacggcaaggccacgcucgagugccagguccagaccgcgguggacuucgggaacuccuacaucgccgagauggagaccgagagcuggaucguggaccggcagugggcccaggaccugacccugcccuggcaguccggcagcggcggggucuggcgcgagaugcaccaccucguggaguucgagcccccgcacgccgccacgauccgggugcuggcgcugggcaaccaggaggggucccucaagaccgcccugaccggcgccaugcgcgucaccaaggacacgaacgacaacaaccuguacaagcuccacgggggccacgugagcugccgggugaagcuguccgcccugacccucaagggcaccagcuacaagaucugcaccgacaagauguucuucgucaagaaccccacggacaccgggcacggcaccguggugaugcaggucaagguguccaagggggcgcccugccgcaucccggugaucgucgccgacgaccugaccgccgccaucaacaagggcauccuggugaccgugaacccgaucgccagcacgaacgacgacgagguccucaucgaggugaacccgcccuucggcgacuccuacaucaucguggggcggggcgacagccgccugaccuaccaguggcacaaggagggguccagcaucggaagcacgcugggcaaggccuuuucaacaacuuugaagggagcucaaagacuggcagcguugggcgacacagccugggacuuuggcucuauuggaggggucuucaacuccauagguagagccguucaccaaguguuuggaggugccuucagaacacucuuugggggaaugucuuggaucacacaagggcuaaugggugcccuacugcucuggaugggcgucaacgcacgagaccgaucaauugcuuuggccuucuuagccacaggaggugugcucguguucuuagcgaccaaugugcacgccugaggacuagucccuguucccagagcccacuuuuuuuucuuuuuuugaaauaaaauagccugucuuucagaucuaaaaaaaaaaaaaaaaaaaaaaaaaaaaaaaaaaaaaaaaaaaaaaaaaaaaaaaaaaaaaaaaugcaucccccccccccccccccccccccccccccccaaaggcucuuuucagagccaccagaauu

SEQ ID NO: 1622 - RNA, 2325 nt, Artificial Sequence
  mRNA product Design a-1 comprising derived and/or modified sequence from YFV__NC_002031.1__SSjev(V3)-prMEdelstem_TM-JEV (polyprotein: aa122-681) (opt1)
gggagagucccgcagucggcguccagcggcucugcuuguucgugugugugucguugcaggccuuauucaagcuuaccaugaacgagggcagcaucauguggcuggccucccucgccguggucaucgcgugcgccggggccgugacgcuggugcggaagaaccgcuggcuccugcugaacgucaccuccgaggaccucggcaagaccuucagcguggggaccggcaacugcacgaccaacauccuggaggccaaguacuggugccccgacuccauggaguacaacugccccaaccugagcccccgggaggagcccgacgacaucgacugcuggugcuacggcguggagaacguccgcguggccuacgggaagugcgacuccgcgggccggagccgccggucccgccgggccaucgaccuccccacccacgagaaccacgggcugaagacccgccaggagaaguggaugacgggccggaugggggagcgccagcugcagaagaucgagcggugguucgugcgcaacccguucuucgccgucaccgcccucaccaucgccuaccuggugggcagcaacaugacccagcggguggucaucgcgcugcucgugcuggccgugggccccgccuacuccgcccacugcaucgggaucacggaccgcgacuucaucgagggcguccacgggggcaccugggugagcgcgacccuggagcaggacaagugcgugaccgucauggcccccgacaagcccucccucgacaucagccuggagacgguggccaucgaccggccggccgaggugcgcaaggucugcuacaacgccgugcugacccacgugaagaucaacgacaagugccccuccaccggcgaggcgcaccucgccgaggagaacgagggggacaacgccugcaagcggaccuacagcgaccggggcugggggaacggcugcgggcuguucggcaagggcuccaucgucgccugcgccaaguucacgugcgcgaaguccaugagccuguucgagguggaccagaccaagauccaguacgucauccgcgcccagcuccacgugggggccaagcaggagaacuggaacaccgacaucaagacccugaaguucgacgcccugagcggcagccaggagguggaguucaucggguacggcaaggccacgcucgagugccagguccagaccgcgguggacuucgggaacuccuacaucgccgagauggagaccgagagcuggaucguggaccggcagugggcccaggaccugacccugcccuggcaguccggcagcggcggggucuggcgcgagaugcaccaccucguggaguucgagcccccgcacgccgccacgauccgggugcuggcgcugggcaaccaggaggggucccucaagaccgcccugaccggcgccaugcgcgucaccaaggacacgaacgacaacaaccuguacaagcuccacgggggccacgugagcugccgggugaagcuguccgcccugacccucaagggcaccagcuacaagaucugcaccgacaagauguucuucgucaagaaccccacggacaccgggcacggcaccguggugaugcaggucaagguguccaagggggcgcccugccgcaucccggugaucgucgccgacgaccugaccgccgccaucaacaagggcauccuggugaccgugaacccgaucgccagcacgaacgacgacgagguccucaucgaggugaacccgcccuucggcgacuccuacaucaucguggggcggggcgacagccgccugaccuaccaguggcacaaggagggguccagcaucggcagcacccuggggaaggccuucuccaccacgcucaagggcgcccagcgccuggcggcccugggggacaccgccugggacuucggcagcaucgggggcguguucaacuccaucggccgggccguccaccagguguucgggggcgccuuccgcacccucuucgggggcaugagcuggaucacccaggggcugaugggcgcgcugcuccuguggaugggggugaacgcccgggaccgcuccaucgcccuggccuuccucgcgacgggcggcguccugguguuccuggccaccaacgugcacgccugaggacuagucccuguucccagagcccacuuuuuuuucuuuuuuugaaauaaaauagccugucuuucagaucuaaaaaaaaaaaaaaaaaaaaaaaaaaaaaaaaaaaaaaaaaaaaaaaaaaaaaaaaaaaaaaaaugcaucccccccccccccccccccccccccccccccaaaggcucuuuucagagccaccagaauu

SEQ ID NO: 1623 - RNA, 2340 nt, Artificial Sequence
  mRNA product Design a-1 comprising derived and/or modified sequence from YFV__NC_002031.1__X-SS-prME (polyprotein: aa92-778) (opt1)
gggagagucccgcagucggcguccagcggcucugcuuguucgugugugugucguugcaggccuuauucaagcuuaccaugcggggccugagcucccgcaagcggcgcagccacgacgugcucaccguccaguuccugauccuggggaugcuccugaugaccggcggggugacgcuggugcggaagaaccgcuggcuccugcugaacgucaccuccgaggaccucggcaagaccuucagcguggggaccggcaacugcacgaccaacauccuggaggccaaguacuggugccccgacuccauggaguacaacugccccaaccugagcccccgggaggagcccgacgacaucgacugcuggugcuacggcguggagaacguccgcguggccuacgggaagugcgacuccgcgggccggagccgccggucccgccgggccaucgaccuccccacccacgagaaccacgggcugaagacccgccaggagaaguggaugacgggccggaugggggagcgccagcugcagaagaucgagcggugguucgugcgcaacccguucuucgccgucaccgcccucaccaucgccuaccuggugggcagcaacaugacccagcggguggucaucgcgcugcucgugcuggccgugggccccgccuacuccgcccacugcaucgggaucacggaccgcgacuucaucgagggcguccacgggggcaccugggugagcgcgacccuggagcaggacaagugcgugaccgucauggcccccgacaagcccucccucgacaucagccuggagacgguggccaucgaccggccggccgaggugcgcaaggucugcuacaacgccgugcugacccacgugaagaucaacgacaagugccccuccaccggcgaggcgcaccucgccgaggagaacgagggggacaacgccugcaagcggaccuacagcgaccggggcugggggaacggcugcgggcuguucggcaagggcuccaucgucgccugcgccaaguucacgugcgcgaaguccaugagccuguucgagguggaccagaccaagauccaguacgucauccgcgcccagcuccacgugggggccaagcaggagaacuggaacaccgacaucaagacccugaaguucgacgcccugagcggcagccaggagguggaguucaucggguacggcaaggccacgcucgagugccagguccagaccgcgguggacuucgggaacuccuacaucgccgagauggagaccgagagcuggaucguggaccggcagugggcccaggaccugacccugcccuggcaguccggcagcggcggggucuggcgcgagaugcaccaccucguggaguucgagcccccgcacgccgccacgauccgggugcuggcgcugggcaaccaggaggggucccucaagaccgcccugaccggcgccaugcgcgucaccaaggacacgaacgacaacaaccuguacaagcuccacgggggccacgugagcugccgggugaagcuguccgcccugacccucaagggcaccagcuacaagaucugcaccgacaagauguucuucgucaagaaccccacggacaccgggcacggcaccguggugaugcaggucaagguguccaagggggcgcccugccgcaucccggugaucgucgccgacgaccugaccgccgccaucaacaagggcauccuggugaccgugaacccgaucgccagcacgaacgacgacgagguccucaucgaggugaacccgcccuucggcgacuccuacaucaucguggggcggggcgacagccgccugaccuaccaguggcacaaggagggguccagcaucggcaagcuguucacccagaccaugaagggggucgagcggcuggcggugaugggcgacacggccugggacuucuccagcgccggcggguucuucaccuccgugggcaaggggauccacaccgucuucggcagcgccuuccaggggcuguucggcggccucaacuggaucaccaaggugaucaugggggccgugcugaucugggucggcaucaacacgcgcaacaugaccauguccaugagcaugauccucgugggggugaucaugauguuccugagccugggcgucggggcgugaggacuagucccuguucccagagcccacuuuuuuuucuuuuuuugaaauaaaauagccugucuuucagaucuaaaaaaaaaaaaaaaaaaaaaaaaaaaaaaaaaaaaaaaaaaaaaaaaaaaaaaaaaaaaaaaaugcaucccccccccccccccccccccccccccccccaaaggcucuuuucagagccaccagaauu

SEQ ID NO: 1624 - RNA, 2343 nt, Artificial Sequence
  mRNA product Design a-1 comprising derived and/or modified sequence from YFV__NC_002031.1__SSjev(V3)-prME-XX (polyprotein: aa122-788) (opt1)
gggagagucccgcagucggcguccagcggcucugcuuguucgugugugugucguugcaggccuuauucaagcuuaccaugaacgagggcagcaucauguggcuggccucccucgccguggucaucgcgugcgccggggccgugacgcuggugcggaagaaccgcuggcuccugcugaacgucaccuccgaggaccucggcaagaccuucagcguggggaccggcaacugcacgaccaacauccuggaggccaaguacuggugccccgacuccauggaguacaacugccccaaccugagcccccgggaggagcccgacgacaucgacugcuggugcuacggcguggagaacguccgcguggccuacgggaagugcgacuccgcgggccggagccgccggucccgccgggccaucgaccuccccacccacgagaaccacgggcugaagacccgccaggagaaguggaugacgggccggaugggggagcgccagcugcagaagaucgagcggugguucgugcgcaacccguucuucgccgucaccgcccucaccaucgccuaccuggugggcagcaacaugacccagcggguggucaucgcgcugcucgugcuggccgugggccccgccuacuccgcccacugcaucgggaucacggaccgcgacuucaucgagggcguccacgggggcaccugggugagcgcgacccuggagcaggacaagugcgugaccgucauggcccccgacaagcccucccucgacaucagccuggagacgguggccaucgaccggccggccgaggugcgcaaggucugcuacaacgccgugcugacccacgugaagaucaacgacaagugccccuccaccggcgaggcgcaccucgccgaggagaacgagggggacaacgccugcaagcggaccuacagcgaccggggcugggggaacggcugcgggcuguucggcaagggcuccaucgucgccugcgccaaguucacgugcgcgaaguccaugagccuguucgagguggaccagaccaagauccaguacgucauccgcgcccagcuccacgugggggccaagcaggagaacuggaacaccgacaucaagacccugaaguucgacgcccugagcggcagccaggagguggaguucaucggguacggcaaggccacgcucgagugccagguccagaccgcgguggacuucgggaacuccuacaucgccgagauggagaccgagagcuggaucguggaccggcagugggcccaggaccugacccugcccuggcaguccggcagcggcggggucuggcgcgagaugcaccaccucguggaguucgagcccccgcacgccgccacgauccgggugcuggcgcugggcaaccaggaggggucccucaagaccgcccugaccggcgccaugcgcgucaccaaggacacgaacgacaacaaccuguacaagcuccacgggggccacgugagcugccgggugaagcuguccgcccugacccucaagggcaccagcuacaagaucugcaccgacaagauguucuucgucaagaaccccacggacaccgggcacggcaccguggugaugcaggucaagguguccaagggggcgcccugccgcaucccggugaucgucgccgacgaccugaccgccgccaucaacaagggcauccuggugaccgugaacccgaucgccagcacgaacgacgacgagguccucaucgaggugaacccgcccuucggcgacuccuacaucaucguggggcggggcgacagccgccugaccuaccaguggcacaaggagggguccagcaucggcaagcuguucacccagaccaugaagggggucgagcggcuggcggugaugggcgacacggccugggacuucuccagcgccggcggguucuucaccuccgugggcaaggggauccacaccgucuucggcagcgccuuccaggggcuguucggcggccucaacuggaucaccaaggugaucaugggggccgugcugaucugggucggcaucaacacgcgcaacaugaccauguccaugagcaugauccucgugggggugaucaugauguuccugagccugggcgucggggcggaccagggcugcgccaucaacuucggcaagugaggacuagucccuguucccagagcccacuuuuuuuucuuuuuuugaaauaaaauagccugucuuucagaucuaaaaaaaaaaaaaaaaaaaaaaaaaaaaaaaaaaaaaaaaaaaaaaaaaaaaaaaaaaaaaaaaugcaucccccccccccccccccccccccccccccccaaaggcucuuuucagagccaccagaauu

SEQ ID NO: 1625 - RNA, 2352 nt, Artificial Sequence
  mRNA product Design a-1 comprising derived and/or modified sequence from YFV__NC_002031.1__X-SS-prMEdelstem_TM-JEV (polyprotein: aa92-681) (opt2)
gggagagucccgcagucggcguccagcggcucugcuuguucgugugugugucguugcaggccuuauucaagcuuaccaugcgcggccucuccucccgcaagcgccgcucccacgacguccucaccguccaguuccucauccucggcaugcuccucaugaccggcggcgucacccucguccgcaagaaccgcuggcuccuccucaacgucaccuccgaggaccucggcaagaccuucuccgucggcaccggcaacugcaccaccaacauccucgaggccaaguacuggugccccgacuccauggaguacaacugccccaaccucuccccccgcgaggagcccgacgacaucgacugcuggugcuacggcgucgagaacguccgcgucgccuacggcaagugcgacuccgccggccgcucccgccgcucccgccgcgccaucgaccuccccacccacgagaaccacggccucaagacccgccaggagaaguggaugaccggccgcaugggcgagcgccagcuccagaagaucgagcgcugguucguccgcaaccccuucuucgccgucaccgcccucaccaucgccuaccucgucggcuccaacaugacccagcgcgucgucaucgcccuccucguccucgccgucggccccgccuacuccgcccacugcaucggcaucaccgaccgcgacuucaucgagggcguccacggcggcaccugggucuccgccacccucgagcaggacaagugcgucaccgucauggcccccgacaagcccucccucgacaucucccucgagaccgucgccaucgaccgccccgccgagguccgcaaggucugcuacaacgccguccucacccacgucaagaucaacgacaagugccccuccaccggcgaggcccaccucgccgaggagaacgagggcgacaacgccugcaagcgcaccuacuccgaccgcggcuggggcaacggcugcggccucuucggcaagggcuccaucgucgccugcgccaaguucaccugcgccaaguccaugucccucuucgaggucgaccagaccaagauccaguacgucauccgcgcccagcuccacgucggcgccaagcaggagaacuggaacaccgacaucaagacccucaaguucgacgcccucuccggcucccaggaggucgaguucaucggcuacggcaaggccacccucgagugccagguccagaccgccgucgacuucggcaacuccuacaucgccgagauggagaccgaguccuggaucgucgaccgccagugggcccaggaccucacccuccccuggcaguccggcuccggcggcgucuggcgcgagaugcaccaccucgucgaguucgagcccccccacgccgccaccauccgcguccucgcccucggcaaccaggagggcucccucaagaccgcccucaccggcgccaugcgcgucaccaaggacaccaacgacaacaaccucuacaagcuccacggcggccacgucuccugccgcgucaagcucuccgcccucacccucaagggcaccuccuacaagaucugcaccgacaagauguucuucgucaagaaccccaccgacaccggccacggcaccgucgucaugcaggucaaggucuccaagggcgcccccugccgcauccccgucaucgucgccgacgaccucaccgccgccaucaacaagggcauccucgucaccgucaaccccaucgccuccaccaacgacgacgagguccucaucgaggucaacccccccuucggcgacuccuacaucaucgucggccgcggcgacucccgccucaccuaccaguggcacaaggagggcuccuccaucggcuccacccucggcaaggccuucuccaccacccucaagggcgcccagcgccucgccgcccucggcgacaccgccugggacuucggcuccaucggcggcgucuucaacuccaucggccgcgccguccaccaggucuucggcggcgccuuccgcacccucuucggcggcauguccuggaucacccagggccucaugggcgcccuccuccucuggaugggcgucaacgcccgcgaccgcuccaucgcccucgccuuccucgccaccggcggcguccucgucuuccucgccaccaacguccacgccugaggacuagucccuguucccagagcccacuuuuuuuucuuuuuuugaaauaaaauagccugucuuucagaucuaaaaaaaaaaaaaaaaaaaaaaaaaaaaaaaaaaaaaaaaaaaaaaaaaaaaaaaaaaaaaaaaugcaucccccccccccccccccccccccccccccccaaaggcucuuuucagagccaccagaauu

SEQ ID NO: 1626 - RNA, 2325 nt, Artificial Sequence
  mRNA product Design a-1 comprising derived and/or modified sequence from YFV__NC_002031.1__SSjev(V3)-prMEdelstem_TM-JEV (polyprotein: aa122-681) (opt2)
gggagagucccgcagucggcguccagcggcucugcuuguucgugugugugucguugcaggccuuauucaagcuuaccaugaacgagggcuccaucauguggcucgccucccucgccgucgucaucgccugcgccggcgccgucacccucguccgcaagaaccgcuggcuccuccucaacgucaccuccgaggaccucggcaagaccuucuccgucggcaccggcaacugcaccaccaacauccucgaggccaaguacuggugccccgacuccauggaguacaacugccccaaccucuccccccgcgaggagcccgacgacaucgacugcuggugcuacggcgucgagaacguccgcgucgccuacggcaagugcgacuccgccggccgcucccgccgcucccgccgcgccaucgaccuccccacccacgagaaccacggccucaagacccgccaggagaaguggaugaccggccgcaugggcgagcgccagcuccagaagaucgagcgcugguucguccgcaaccccuucuucgccgucaccgcccucaccaucgccuaccucgucggcuccaacaugacccagcgcgucgucaucgcccuccucguccucgccgucggccccgccuacuccgcccacugcaucggcaucaccgaccgcgacuucaucgagggcguccacggcggcaccugggucuccgccacccucgagcaggacaagugcgucaccgucauggcccccgacaagcccucccucgacaucucccucgagaccgucgccaucgaccgccccgccgagguccgcaaggucugcuacaacgccguccucacccacgucaagaucaacgacaagugccccuccaccggcgaggcccaccucgccgaggagaacgagggcgacaacgccugcaagcgcaccuacuccgaccgcggcuggggcaacggcugcggccucuucggcaagggcuccaucgucgccugcgccaaguucaccugcgccaaguccaugucccucuucgaggucgaccagaccaagauccaguacgucauccgcgcccagcuccacgucggcgccaagcaggagaacuggaacaccgacaucaagacccucaaguucgacgcccucuccggcucccaggaggucgaguucaucggcuacggcaaggccacccucgagugccagguccagaccgccgucgacuucggcaacuccuacaucgccgagauggagaccgaguccuggaucgucgaccgccagugggcccaggaccucacccuccccuggcaguccggcuccggcggcgucuggcgcgagaugcaccaccucgucgaguucgagcccccccacgccgccaccauccgcguccucgcccucggcaaccaggagggcucccucaagaccgcccucaccggcgccaugcgcgucaccaaggacaccaacgacaacaaccucuacaagcuccacggcggccacgucuccugccgcgucaagcucuccgcccucacccucaagggcaccuccuacaagaucugcaccgacaagauguucuucgucaagaaccccaccgacaccggccacggcaccgucgucaugcaggucaaggucuccaagggcgcccccugccgcauccccgucaucgucgccgacgaccucaccgccgccaucaacaagggcauccucgucaccgucaaccccaucgccuccaccaacgacgacgagguccucaucgaggucaacccccccuucggcgacuccuacaucaucgucggccgcggcgacucccgccucaccuaccaguggcacaaggagggcuccuccaucggcuccacccucggcaaggccuucuccaccacccucaagggcgcccagcgccucgccgcccucggcgacaccgccugggacuucggcuccaucggcggcgucuucaacuccaucggccgcgccguccaccaggucuucggcggcgccuuccgcacccucuucggcggcauguccuggaucacccagggccucaugggcgcccuccuccucuggaugggcgucaacgcccgcgaccgcuccaucgcccucgccuuccucgccaccggcggcguccucgucuuccucgccaccaacguccacgccugaggacuagucccuguucccagagcccacuuuuuuuucuuuuuuugaaauaaaauagccugucuuucagaucuaaaaaaaaaaaaaaaaaaaaaaaaaaaaaaaaaaaaaaaaaaaaaaaaaaaaaaaaaaaaaaaaugcaucccccccccccccccccccccccccccccccaaaggcucuuuucagagccaccagaauu

SEQ ID NO: 1627 - RNA, 2340 nt, Artificial Sequence
  mRNA product Design a-1 comprising derived and/or modified sequence from YFV__NC_002031.1__X-SS-prME (polyprotein: aa92-778) (opt2)
gggagagucccgcagucggcguccagcggcucugcuuguucgugugugugucguugcaggccuuauucaagcuuaccaugcgcggccucuccucccgcaagcgccgcucccacgacguccucaccguccaguuccucauccucggcaugcuccucaugaccggcggcgucacccucguccgcaagaaccgcuggcuccuccucaacgucaccuccgaggaccucggcaagaccuucuccgucggcaccggcaacugcaccaccaacauccucgaggccaaguacuggugccccgacuccauggaguacaacugccccaaccucuccccccgcgaggagcccgacgacaucgacugcuggugcuacggcgucgagaacguccgcgucgccuacggcaagugcgacuccgccggccgcucccgccgcucccgccgcgccaucgaccuccccacccacgagaaccacggccucaagacccgccaggagaaguggaugaccggccgcaugggcgagcgccagcuccagaagaucgagcgcugguucguccgcaaccccuucuucgccgucaccgcccucaccaucgccuaccucgucggcuccaacaugacccagcgcgucgucaucgcccuccucguccucgccgucggccccgccuacuccgcccacugcaucggcaucaccgaccgcgacuucaucgagggcguccacggcggcaccugggucuccgccacccucgagcaggacaagugcgucaccgucauggcccccgacaagcccucccucgacaucucccucgagaccgucgccaucgaccgccccgccgagguccgcaaggucugcuacaacgccguccucacccacgucaagaucaacgacaagugccccuccaccggcgaggcccaccucgccgaggagaacgagggcgacaacgccugcaagcgcaccuacuccgaccgcggcuggggcaacggcugcggccucuucggcaagggcuccaucgucgccugcgccaaguucaccugcgccaaguccaugucccucuucgaggucgaccagaccaagauccaguacgucauccgcgcccagcuccacgucggcgccaagcaggagaacuggaacaccgacaucaagacccucaaguucgacgcccucuccggcucccaggaggucgaguucaucggcuacggcaaggccacccucgagugccagguccagaccgccgucgacuucggcaacuccuacaucgccgagauggagaccgaguccuggaucgucgaccgccagugggcccaggaccucacccuccccuggcaguccggcuccggcggcgucuggcgcgagaugcaccaccucgucgaguucgagcccccccacgccgccaccauccgcguccucgcccucggcaaccaggagggcucccucaagaccgcccucaccggcgccaugcgcgucaccaaggacaccaacgacaacaaccucuacaagcuccacggcggccacgucuccugccgcgucaagcucuccgcccucacccucaagggcaccuccuacaagaucugcaccgacaagauguucuucgucaagaaccccaccgacaccggccacggcaccgucgucaugcaggucaaggucuccaagggcgcccccugccgcauccccgucaucgucgccgacgaccucaccgccgccaucaacaagggcauccucgucaccgucaaccccaucgccuccaccaacgacgacgagguccucaucgaggucaacccccccuucggcgacuccuacaucaucgucggccgcggcgacucccgccucaccuaccaguggcacaaggagggcuccuccaucggcaagcucuucacccagaccaugaagggcgucgagcgccucgccgucaugggcgacaccgccugggacuucuccuccgccggcggcuucuucaccuccgucggcaagggcauccacaccgucuucggcuccgccuuccagggccucuucggcggccucaacuggaucaccaaggucaucaugggcgccguccucaucugggucggcaucaacacccgcaacaugaccauguccauguccaugauccucgucggcgucaucaugauguuccucucccucggcgucggcgccugaggacuagucccuguucccagagcccacuuuuuuuucuuuuuuugaaauaaaauagccugucuuucagaucuaaaaaaaaaaaaaaaaaaaaaaaaaaaaaaaaaaaaaaaaaaaaaaaaaaaaaaaaaaaaaaaaugcaucccccccccccccccccccccccccccccccaaaggcucuuuucagagccaccagaauu

SEQ ID NO: 1628 - RNA, 2343 nt, Artificial Sequence
  mRNA product Design a-1 comprising derived and/or modified sequence from YFV__NC_002031.1__SSjev(V3)-prME-XX (polyprotein: aa122-788) (opt2)
gggagagucccgcagucggcguccagcggcucugcuuguucgugugugugucguugcaggccuuauucaagcuuaccaugaacgagggcuccaucauguggcucgccucccucgccgucgucaucgccugcgccggcgccgucacccucguccgcaagaaccgcuggcuccuccucaacgucaccuccgaggaccucggcaagaccuucuccgucggcaccggcaacugcaccaccaacauccucgaggccaaguacuggugccccgacuccauggaguacaacugccccaaccucuccccccgcgaggagcccgacgacaucgacugcuggugcuacggcgucgagaacguccgcgucgccuacggcaagugcgacuccgccggccgcucccgccgcucccgccgcgccaucgaccuccccacccacgagaaccacggccucaagacccgccaggagaaguggaugaccggccgcaugggcgagcgccagcuccagaagaucgagcgcugguucguccgcaaccccuucuucgccgucaccgcccucaccaucgccuaccucgucggcuccaacaugacccagcgcgucgucaucgcccuccucguccucgccgucggccccgccuacuccgcccacugcaucggcaucaccgaccgcgacuucaucgagggcguccacggcggcaccugggucuccgccacccucgagcaggacaagugcgucaccgucauggcccccgacaagcccucccucgacaucucccucgagaccgucgccaucgaccgccccgccgagguccgcaaggucugcuacaacgccguccucacccacgucaagaucaacgacaagugccccuccaccggcgaggcccaccucgccgaggagaacgagggcgacaacgccugcaagcgcaccuacuccgaccgcggcuggggcaacggcugcggccucuucggcaagggcuccaucgucgccugcgccaaguucaccugcgccaaguccaugucccucuucgaggucgaccagaccaagauccaguacgucauccgcgcccagcuccacgucggcgccaagcaggagaacuggaacaccgacaucaagacccucaaguucgacgcccucuccggcucccaggaggucgaguucaucggcuacggcaaggccacccucgagugccagguccagaccgccgucgacuucggcaacuccuacaucgccgagauggagaccgaguccuggaucgucgaccgccagugggcccaggaccucacccuccccuggcaguccggcuccggcggcgucuggcgcgagaugcaccaccucgucgaguucgagcccccccacgccgccaccauccgcguccucgcccucggcaaccaggagggcucccucaagaccgcccucaccggcgccaugcgcgucaccaaggacaccaacgacaacaaccucuacaagcuccacggcggccacgucuccugccgcgucaagcucuccgcccucacccucaagggcaccuccuacaagaucugcaccgacaagauguucuucgucaagaaccccaccgacaccggccacggcaccgucgucaugcaggucaaggucuccaagggcgcccccugccgcauccccgucaucgucgccgacgaccucaccgccgccaucaacaagggcauccucgucaccgucaaccccaucgccuccaccaacgacgacgagguccucaucgaggucaacccccccuucggcgacuccuacaucaucgucggccgcggcgacucccgccucaccuaccaguggcacaaggagggcuccuccaucggcaagcucuucacccagaccaugaagggcgucgagcgccucgccgucaugggcgacaccgccugggacuucuccuccgccggcggcuucuucaccuccgucggcaagggcauccacaccgucuucggcuccgccuuccagggccucuucggcggccucaacuggaucaccaaggucaucaugggcgccguccucaucugggucggcaucaacacccgcaacaugaccauguccauguccaugauccucgucggcgucaucaugauguuccucucccucggcgucggcgccgaccagggcugcgccaucaacuucggcaagugaggacuagucccuguucccagagcccacuuuuuuuucuuuuuuugaaauaaaauagccugucuuucagaucuaaaaaaaaaaaaaaaaaaaaaaaaaaaaaaaaaaaaaaaaaaaaaaaaaaaaaaaaaaaaaaaaugcaucccccccccccccccccccccccccccccccaaaggcucuuuucagagccaccagaauu

SEQ ID NO: 1629 - RNA, 2352 nt, Artificial Sequence
  mRNA product Design a-1 comprising derived and/or modified sequence from YFV__NC_002031.1__X-SS-prMEdelstem_TM-JEV (polyprotein: aa92-681) (opt3)
gggagagucccgcagucggcguccagcggcucugcuuguucgugugugugucguugcaggccuuauucaagcuuaccaugagaggccugagcuccaggaagcggcgcucucacgacgugcucaccguccaguuccuuauccuggggauguuguuaaugacaggagguguuacucuggugcguaaaaaccgauggcuacuccugaauguaacgucagaggaucuuggcaagaccuuuaguguggggacaggaaacugcacuaccaauauucuggaagccaaauacuggugucccgacagcauggaguauaacugcccuaauuuguccccaagagaggaaccggaugacauagauuguuggugcuacggcgucgaaaacgugaggguugcuuaugguaagugugacucugcagggcggucgcgcagaucaaggcgggccaucgaucuccccacacaugagaaucacggacugaaaacccgccaagagaaguggaugacuggccgaaugggcgaaagacagcugcagaagauugagaggugguucgugcggaacccuuucuucgcggucacagcucucaccaucgccuacuuaguggggagcaauaugacgcagcguguaguuauugcacugcuuguguuggccgucggaccagcuuauagugcacauugcaucgguauaacugaccgcgauuuuaucgaaggcgugcacgggggaaccuggguguccgccacacuggagcaagacaaaugugucacuguuauggcucccgauaagccuucucuagacauuagccucgagaccguggccaucgauagaccagcggaaguaaggaaagugugcuacaacgcaguccugacacaugugaagauuaaugacaaaugucccuccaccggcgaggcccaccuugcugaagagaacgaaggugacaaugccugcaagcggacguauucagaucgaggguggggaaacggcuguggccuguucgggaagggaaguaucguugcaugcgcuaaauuuacuugcgccaagagcaugucuuuguucgagguggaccagacaaaaauacaguacgucauucgcgcgcagcuccacgugggugccaagcaagagaauuggaacaccgauaucaaaacucugaaguuugacgcauuauccggcucacaggaaguagaguucauuggguacggaaaagcuacacuggaaugucagguucagaccgccguggauuuuggcaacagcuauaucgcugagauggaaacggagaguuggaucgucgacagacaaugggcccaggaucucacccuuccuuggcagucugguuccgggggcguguggagggagaugcaucaccuggucgaauuugagccaccgcaugcagccacaauucggguguuggcucuaggaaaucaagaaggcagccugaagacugcgcucaccggggcaaugcgcguuacaaaggacacuaacgauaauaaccuguacaaacuucacggaggucacgugucgugcagaguaaagcugucugccuugacccucaaaggcacauccuauaagauauguaccgacaaaauguuuuucgucaagaaucccacugauacggggcauggaacagugguuaugcaagugaaggucucaaaaggcgcuccuugcaggaucccagugauuguagccgacgaccugaccgcagccaucaacaaggguauauuagugacuguuaaucccauugcuaguaccaacgaugacgagguccugaucgaagugaauccuccauucggggauagcuacaucauugugggccguggagacucccggcuaacauaucaguggcacaaagagggcucuagcaucggcagcacccuggggaaggccuucuccacaacucucaaaggagcucagagacuugcagcccugggugacacggcgugggauuuuggcucuaucgggggaguguucaacucaauuggcagggcuguccaccaaguuuuugguggggccuuccggaccuuguuuggaggcaugaguuggauaacacagggcuuaaugggggcacugcuacucuggaugggagugaaugcccgcgaccgaagcaucgcucuggcauuccuugccacugguggcguacugguguuuuuggcuaccaacguccaugccugaggacuagucccuguucccagagcccacuuuuuuuucuuuuuuugaaauaaaauagccugucuuucagaucuaaaaaaaaaaaaaaaaaaaaaaaaaaaaaaaaaaaaaaaaaaaaaaaaaaaaaaaaaaaaaaaaugcaucccccccccccccccccccccccccccccccaaaggcucuuuucagagccaccagaauu

SEQ ID NO: 1630 - RNA, 2325 nt, Artificial Sequence
  mRNA product Design a-1 comprising derived and/or modified sequence from YFV__NC_002031.1__SSjev(V3)-prMEdelstem_TM-JEV (polyprotein: aa122-681) (opt3)
gggagagucccgcagucggcguccagcggcucugcuuguucgugugugugucguugcaggccuuauucaagcuuaccaugaacgagggcagcaucauguggcuggccucccucgcuguggucauugcaugcgccggggcgguuacucuggugcguaaaaaccgauggcuacuccugaauguaacgucagaggaucuuggcaagaccuuuaguguggggacaggaaacugcacuaccaauauucuggaagccaaauacuggugucccgacagcauggaguauaacugcccuaauuuguccccaagagaggaaccggaugacauagauuguuggugcuacggcgucgaaaacgugaggguugcuuaugguaagugugacucugcagggcggucgcgcagaucaaggcgggccaucgaucuccccacacaugagaaucacggacugaaaacccgccaagagaaguggaugacuggccgaaugggcgaaagacagcugcagaagauugagaggugguucgugcggaacccuuucuucgcggucacagcucucaccaucgccuacuuaguggggagcaauaugacgcagcguguaguuauugcacugcuuguguuggccgucggaccagcuuauagugcacauugcaucgguauaacugaccgcgauuuuaucgaaggcgugcacgggggaaccuggguguccgccacacuggagcaagacaaaugugucacuguuauggcucccgauaagccuucucuagacauuagccucgagaccguggccaucgauagaccagcggaaguaaggaaagugugcuacaacgcaguccugacacaugugaagauuaaugacaaaugucccuccaccggcgaggcccaccuugcugaagagaacgaaggugacaaugccugcaagcggacguauucagaucgaggguggggaaacggcuguggccuguucgggaagggaaguaucguugcaugcgcuaaauuuacuugcgccaagagcaugucuuuguucgagguggaccagacaaaaauacaguacgucauucgcgcgcagcuccacgugggugccaagcaagagaauuggaacaccgauaucaaaacucugaaguuugacgcauuauccggcucacaggaaguagaguucauuggguacggaaaagcuacacuggaaugucagguucagaccgccguggauuuuggcaacagcuauaucgcugagauggaaacggagaguuggaucgucgacagacaaugggcccaggaucucacccuuccuuggcagucugguuccgggggcguguggagggagaugcaucaccuggucgaauuugagccaccgcaugcagccacaauucggguguuggcucuaggaaaucaagaaggcagccugaagacugcgcucaccggggcaaugcgcguuacaaaggacacuaacgauaauaaccuguacaaacuucacggaggucacgugucgugcagaguaaagcugucugccuugacccucaaaggcacauccuauaagauauguaccgacaaaauguuuuucgucaagaaucccacugauacggggcauggaacagugguuaugcaagugaaggucucaaaaggcgcuccuugcaggaucccagugauuguagccgacgaccugaccgcagccaucaacaaggguauauuagugacuguuaaucccauugcuaguaccaacgaugacgagguccugaucgaagugaauccuccauucggggauagcuacaucauugugggccguggagacucccggcuaacauaucaguggcacaaagagggcucuagcaucggcagcacccuggggaaggccuucuccacaacucucaaaggagcucagagacuugcagcccugggugacacggcgugggauuuuggcucuaucgggggaguguucaacucaauuggcagggcuguccaccaaguuuuugguggggccuuccggaccuuguuuggaggcaugaguuggauaacacagggcuuaaugggggcacugcuacucuggaugggagugaaugcccgcgaccgaagcaucgcucuggcauuccuugccacugguggcguacugguguuuuuggcuaccaacguccaugccugaggacuagucccuguucccagagcccacuuuuuuuucuuuuuuugaaauaaaauagccugucuuucagaucuaaaaaaaaaaaaaaaaaaaaaaaaaaaaaaaaaaaaaaaaaaaaaaaaaaaaaaaaaaaaaaaaugcaucccccccccccccccccccccccccccccccaaaggcucuuuucagagccaccagaauu

SEQ ID NO: 1631 - RNA, 2340 nt, Artificial Sequence
  mRNA product Design a-1 comprising derived and/or modified sequence from YFV__NC_002031.1__X-SS-prME (polyprotein: aa92-778) (opt3)
gggagagucccgcagucggcguccagcggcucugcuuguucgugugugugucguugcaggccuuauucaagcuuaccaugagaggccugagcuccaggaagcggcgcucucacgacgugcucaccguccaguuccuuauccuggggauguuguuaaugacaggagguguuacucuggugcguaaaaaccgauggcuacuccugaauguaacgucagaggaucuuggcaagaccuuuaguguggggacaggaaacugcacuaccaauauucuggaagccaaauacuggugucccgacagcauggaguauaacugcccuaauuuguccccaagagaggaaccggaugacauagauuguuggugcuacggcgucgaaaacgugaggguugcuuaugguaagugugacucugcagggcggucgcgcagaucaaggcgggccaucgaucuccccacacaugagaaucacggacugaaaacccgccaagagaaguggaugacuggccgaaugggcgaaagacagcugcagaagauugagaggugguucgugcggaacccuuucuucgcggucacagcucucaccaucgccuacuuaguggggagcaauaugacgcagcguguaguuauugcacugcuuguguuggccgucggaccagcuuauagugcacauugcaucgguauaacugaccgcgauuuuaucgaaggcgugcacgggggaaccuggguguccgccacacuggagcaagacaaaugugucacuguuauggcucccgauaagccuucucuagacauuagccucgagaccguggccaucgauagaccagcggaaguaaggaaagugugcuacaacgcaguccugacacaugugaagauuaaugacaaaugucccuccaccggcgaggcccaccuugcugaagagaacgaaggugacaaugccugcaagcggacguauucagaucgaggguggggaaacggcuguggccuguucgggaagggaaguaucguugcaugcgcuaaauuuacuugcgccaagagcaugucuuuguucgagguggaccagacaaaaauacaguacgucauucgcgcgcagcuccacgugggugccaagcaagagaauuggaacaccgauaucaaaacucugaaguuugacgcauuauccggcucacaggaaguagaguucauuggguacggaaaagcuacacuggaaugucagguucagaccgccguggauuuuggcaacagcuauaucgcugagauggaaacggagaguuggaucgucgacagacaaugggcccaggaucucacccuuccuuggcagucugguuccgggggcguguggagggagaugcaucaccuggucgaauuugagccaccgcaugcagccacaauucggguguuggcucuaggaaaucaagaaggcagccugaagacugcgcucaccggggcaaugcgcguuacaaaggacacuaacgauaauaaccuguacaaacuucacggaggucacgugucgugcagaguaaagcugucugccuugacccucaaaggcacauccuauaagauauguaccgacaaaauguuuuucgucaagaaucccacugauacggggcauggaacagugguuaugcaagugaaggucucaaaaggcgcuccuugcaggaucccagugauuguagccgacgaccugaccgcagccaucaacaaggguauauuagugacuguuaaucccauugcuaguaccaacgaugacgagguccugaucgaagugaauccuccauucggggauagcuacaucauugugggccguggagacucccggcuaacauaucaguggcacaaagagggcucuagcaucgggaagcucuuuacccagacuaugaaaggagucgagcgacuggccguuaugggugauacagcaugggacuucucaagugcgggcggguuuuucacguccgugggaaagggcauucauaccguguuugguagcgcuuuccaggggcuuuuuggcggauugaacuggauaacuaagguaaucaugggcgccguccugauuuggguggggaucaauacaagaaacaugaccaugucuaugucaaugauccucguuggagugauuaugauguuccugagucuuggcgucggugcaugaggacuagucccuguucccagagcccacuuuuuuuucuuuuuuugaaauaaaauagccugucuuucagaucuaaaaaaaaaaaaaaaaaaaaaaaaaaaaaaaaaaaaaaaaaaaaaaaaaaaaaaaaaaaaaaaaugcaucccccccccccccccccccccccccccccccaaaggcucuuuucagagccaccagaauu

SEQ ID NO: 1632 - RNA, 2343 nt, Artificial Sequence
  mRNA product Design a-1 comprising derived and/or modified sequence from YFV__NC_002031.1__SSjev(V3)-prME-XX (polyprotein: aa122-788) (opt3)
gggagagucccgcagucggcguccagcggcucugcuuguucgugugugugucguugcaggccuuauucaagcuuaccaugaacgagggcagcaucauguggcuggccucccucgcuguggucauugcaugcgccggggcgguuacucuggugcguaaaaaccgauggcuacuccugaauguaacgucagaggaucuuggcaagaccuuuaguguggggacaggaaacugcacuaccaauauucuggaagccaaauacuggugucccgacagcauggaguauaacugcccuaauuuguccccaagagaggaaccggaugacauagauuguuggugcuacggcgucgaaaacgugaggguugcuuaugguaagugugacucugcagggcggucgcgcagaucaaggcgggccaucgaucuccccacacaugagaaucacggacugaaaacccgccaagagaaguggaugacuggccgaaugggcgaaagacagcugcagaagauugagaggugguucgugcggaacccuuucuucgcggucacagcucucaccaucgccuacuuaguggggagcaauaugacgcagcguguaguuauugcacugcuuguguuggccgucggaccagcuuauagugcacauugcaucgguauaacugaccgcgauuuuaucgaaggcgugcacgggggaaccuggguguccgccacacuggagcaagacaaaugugucacuguuauggcucccgauaagccuucucuagacauuagccucgagaccguggccaucgauagaccagcggaaguaaggaaagugugcuacaacgcaguccugacacaugugaagauuaaugacaaaugucccuccaccggcgaggcccaccuugcugaagagaacgaaggugacaaugccugcaagcggacguauucagaucgaggguggggaaacggcuguggccuguucgggaagggaaguaucguugcaugcgcuaaauuuacuugcgccaagagcaugucuuuguucgagguggaccagacaaaaauacaguacgucauucgcgcgcagcuccacgugggugccaagcaagagaauuggaacaccgauaucaaaacucugaaguuugacgcauuauccggcucacaggaaguagaguucauuggguacggaaaagcuacacuggaaugucagguucagaccgccguggauuuuggcaacagcuauaucgcugagauggaaacggagaguuggaucgucgacagacaaugggcccaggaucucacccuuccuuggcagucugguuccgggggcguguggagggagaugcaucaccuggucgaauuugagccaccgcaugcagccacaauucggguguuggcucuaggaaaucaagaaggcagccugaagacugcgcucaccggggcaaugcgcguuacaaaggacacuaacgauaauaaccuguacaaacuucacggaggucacgugucgugcagaguaaagcugucugccuugacccucaaaggcacauccuauaagauauguaccgacaaaauguuuuucgucaagaaucccacugauacggggcauggaacagugguuaugcaagugaaggucucaaaaggcgcuccuugcaggaucccagugauuguagccgacgaccugaccgcagccaucaacaaggguauauuagugacuguuaaucccauugcuaguaccaacgaugacgagguccugaucgaagugaauccuccauucggggauagcuacaucauugugggccguggagacucccggcuaacauaucaguggcacaaagagggcucuagcaucgggaagcucuuuacccagacuaugaaaggagucgagcgacuggccguuaugggugauacagcaugggacuucucaagugcgggcggguuuuucacguccgugggaaagggcauucauaccguguuugguagcgcuuuccaggggcuuuuuggcggauugaacuggauaacuaagguaaucaugggcgccguccugauuuggguggggaucaauacaagaaacaugaccaugucuaugucaaugauccucguuggagugauuaugauguuccugagucuuggcgucggugcagaucaggggugugccauaaauuuuggaaaaugaggacuagucccuguucccagagcccacuuuuuuuucuuuuuuugaaauaaaauagccugucuuucagaucuaaaaaaaaaaaaaaaaaaaaaaaaaaaaaaaaaaaaaaaaaaaaaaaaaaaaaaaaaaaaaaaaugcaucccccccccccccccccccccccccccccccaaaggcucuuuucagagccaccagaauu

SEQ ID NO: 1633 - RNA, 2352 nt, Artificial Sequence
  mRNA product Design a-1 comprising derived and/or modified sequence from YFV__NC_002031.1__X-SS-prMEdelstem_TM-JEV (polyprotein: aa92-681) (opt4)
gggagagucccgcagucggcguccagcggcucugcuuguucgugugugugucguugcaggccuuauucaagcuuaccaugagaggccugagcagcagaaagagaagaagccacgacgugcugaccgugcaguuccugauccugggcaugcugcugaugaccggcggcgugacccuggugagaaagaacagauggcugcugcugaacgugaccagcgaggaccugggcaagaccuucagcgugggcaccggcaacugcaccaccaacauccuggaggccaaguacuggugccccgacagcauggaguacaacugccccaaccugagccccagagaggagcccgacgacaucgacugcuggugcuacggcguggagaacgugagaguggccuacggcaagugcgacagcgccggcagaagcagaagaagcagaagagccaucgaccugcccacccacgagaaccacggccugaagaccagacaggagaaguggaugaccggcagaaugggcgagagacagcugcagaagaucgagagaugguucgugagaaaccccuucuucgccgugaccgcccugaccaucgccuaccuggugggcagcaacaugacccagagaguggugaucgcccugcuggugcuggccgugggccccgccuacagcgcccacugcaucggcaucaccgacagagacuucaucgagggcgugcacggcggcaccugggugagcgccacccuggagcaggacaagugcgugaccgugauggcccccgacaagcccagccuggacaucagccuggagaccguggccaucgacagacccgccgaggugagaaaggugugcuacaacgccgugcugacccacgugaagaucaacgacaagugccccagcaccggcgaggcccaccuggccgaggagaacgagggcgacaacgccugcaagagaaccuacagcgacagaggcuggggcaacggcugcggccuguucggcaagggcagcaucguggccugcgccaaguucaccugcgccaagagcaugagccuguucgagguggaccagaccaagauccaguacgugaucagagcccagcugcacgugggcgccaagcaggagaacuggaacaccgacaucaagacccugaaguucgacgcccugagcggcagccaggagguggaguucaucggcuacggcaaggccacccuggagugccaggugcagaccgccguggacuucggcaacagcuacaucgccgagauggagaccgagagcuggaucguggacagacagugggcccaggaccugacccugcccuggcagagcggcagcggcggcguguggagagagaugcaccaccugguggaguucgagcccccccacgccgccaccaucagagugcuggcccugggcaaccaggagggcagccugaagaccgcccugaccggcgccaugagagugaccaaggacaccaacgacaacaaccuguacaagcugcacggcggccacgugagcugcagagugaagcugagcgcccugacccugaagggcaccagcuacaagaucugcaccgacaagauguucuucgugaagaaccccaccgacaccggccacggcaccguggugaugcaggugaaggugagcaagggcgcccccugcagaauccccgugaucguggccgacgaccugaccgccgccaucaacaagggcauccuggugaccgugaaccccaucgccagcaccaacgacgacgaggugcugaucgaggugaacccccccuucggcgacagcuacaucaucgugggcagaggcgacagcagacugaccuaccaguggcacaaggagggcagcagcaucggcagcacccugggcaaggccuucagcaccacccugaagggcgcccagagacuggccgcccugggcgacaccgccugggacuucggcagcaucggcggcguguucaacagcaucggcagagccgugcaccagguguucggcggcgccuucagaacccuguucggcggcaugagcuggaucacccagggccugaugggcgcccugcugcuguggaugggcgugaacgccagagacagaagcaucgcccuggccuuccuggccaccggcggcgugcugguguuccuggccaccaacgugcacgccugaggacuagucccuguucccagagcccacuuuuuuuucuuuuuuugaaauaaaauagccugucuuucagaucuaaaaaaaaaaaaaaaaaaaaaaaaaaaaaaaaaaaaaaaaaaaaaaaaaaaaaaaaaaaaaaaaugcaucccccccccccccccccccccccccccccccaaaggcucuuuucagagccaccagaauu

SEQ ID NO: 1634 - RNA, 2325 nt, Artificial Sequence
  mRNA product Design a-1 comprising derived and/or modified sequence from YFV__NC_002031.1__SSjev(V3)-prMEdelstem_TM-JEV (polyprotein: aa122-681) (opt4)
gggagagucccgcagucggcguccagcggcucugcuuguucgugugugugucguugcaggccuuauucaagcuuaccaugaacgagggcagcaucauguggcuggccagccuggccguggugaucgccugcgccggcgccgugacccuggugagaaagaacagauggcugcugcugaacgugaccagcgaggaccugggcaagaccuucagcgugggcaccggcaacugcaccaccaacauccuggaggccaaguacuggugccccgacagcauggaguacaacugccccaaccugagccccagagaggagcccgacgacaucgacugcuggugcuacggcguggagaacgugagaguggccuacggcaagugcgacagcgccggcagaagcagaagaagcagaagagccaucgaccugcccacccacgagaaccacggccugaagaccagacaggagaaguggaugaccggcagaaugggcgagagacagcugcagaagaucgagagaugguucgugagaaaccccuucuucgccgugaccgcccugaccaucgccuaccuggugggcagcaacaugacccagagaguggugaucgcccugcuggugcuggccgugggccccgccuacagcgcccacugcaucggcaucaccgacagagacuucaucgagggcgugcacggcggcaccugggugagcgccacccuggagcaggacaagugcgugaccgugauggcccccgacaagcccagccuggacaucagccuggagaccguggccaucgacagacccgccgaggugagaaaggugugcuacaacgccgugcugacccacgugaagaucaacgacaagugccccagcaccggcgaggcccaccuggccgaggagaacgagggcgacaacgccugcaagagaaccuacagcgacagaggcuggggcaacggcugcggccuguucggcaagggcagcaucguggccugcgccaaguucaccugcgccaagagcaugagccuguucgagguggaccagaccaagauccaguacgugaucagagcccagcugcacgugggcgccaagcaggagaacuggaacaccgacaucaagacccugaaguucgacgcccugagcggcagccaggagguggaguucaucggcuacggcaaggccacccuggagugccaggugcagaccgccguggacuucggcaacagcuacaucgccgagauggagaccgagagcuggaucguggacagacagugggcccaggaccugacccugcccuggcagagcggcagcggcggcguguggagagagaugcaccaccugguggaguucgagcccccccacgccgccaccaucagagugcuggcccugggcaaccaggagggcagccugaagaccgcccugaccggcgccaugagagugaccaaggacaccaacgacaacaaccuguacaagcugcacggcggccacgugagcugcagagugaagcugagcgcccugacccugaagggcaccagcuacaagaucugcaccgacaagauguucuucgugaagaaccccaccgacaccggccacggcaccguggugaugcaggugaaggugagcaagggcgcccccugcagaauccccgugaucguggccgacgaccugaccgccgccaucaacaagggcauccuggugaccgugaaccccaucgccagcaccaacgacgacgaggugcugaucgaggugaacccccccuucggcgacagcuacaucaucgugggcagaggcgacagcagacugaccuaccaguggcacaaggagggcagcagcaucggcagcacccugggcaaggccuucagcaccacccugaagggcgcccagagacuggccgcccugggcgacaccgccugggacuucggcagcaucggcggcguguucaacagcaucggcagagccgugcaccagguguucggcggcgccuucagaacccuguucggcggcaugagcuggaucacccagggccugaugggcgcccugcugcuguggaugggcgugaacgccagagacagaagcaucgcccuggccuuccuggccaccggcggcgugcugguguuccuggccaccaacgugcacgccugaggacuagucccuguucccagagcccacuuuuuuuucuuuuuuugaaauaaaauagccugucuuucagaucuaaaaaaaaaaaaaaaaaaaaaaaaaaaaaaaaaaaaaaaaaaaaaaaaaaaaaaaaaaaaaaaaugcaucccccccccccccccccccccccccccccccaaaggcucuuuucagagccaccagaauu

SEQ ID NO: 1635 - RNA, 2340 nt, Artificial Sequence
  mRNA product Design a-1 comprising derived and/or modified sequence from YFV__NC_002031.1__X-SS-prME (polyprotein: aa92-778) (opt4)
gggagagucccgcagucggcguccagcggcucugcuuguucgugugugugucguugcaggccuuauucaagcuuaccaugagaggccugagcagcagaaagagaagaagccacgacgugcugaccgugcaguuccugauccugggcaugcugcugaugaccggcggcgugacccuggugagaaagaacagauggcugcugcugaacgugaccagcgaggaccugggcaagaccuucagcgugggcaccggcaacugcaccaccaacauccuggaggccaaguacuggugccccgacagcauggaguacaacugccccaaccugagccccagagaggagcccgacgacaucgacugcuggugcuacggcguggagaacgugagaguggccuacggcaagugcgacagcgccggcagaagcagaagaagcagaagagccaucgaccugcccacccacgagaaccacggccugaagaccagacaggagaaguggaugaccggcagaaugggcgagagacagcugcagaagaucgagagaugguucgugagaaaccccuucuucgccgugaccgcccugaccaucgccuaccuggugggcagcaacaugacccagagaguggugaucgcccugcuggugcuggccgugggccccgccuacagcgcccacugcaucggcaucaccgacagagacuucaucgagggcgugcacggcggcaccugggugagcgccacccuggagcaggacaagugcgugaccgugauggcccccgacaagcccagccuggacaucagccuggagaccguggccaucgacagacccgccgaggugagaaaggugugcuacaacgccgugcugacccacgugaagaucaacgacaagugccccagcaccggcgaggcccaccuggccgaggagaacgagggcgacaacgccugcaagagaaccuacagcgacagaggcuggggcaacggcugcggccuguucggcaagggcagcaucguggccugcgccaaguucaccugcgccaagagcaugagccuguucgagguggaccagaccaagauccaguacgugaucagagcccagcugcacgugggcgccaagcaggagaacuggaacaccgacaucaagacccugaaguucgacgcccugagcggcagccaggagguggaguucaucggcuacggcaaggccacccuggagugccaggugcagaccgccguggacuucggcaacagcuacaucgccgagauggagaccgagagcuggaucguggacagacagugggcccaggaccugacccugcccuggcagagcggcagcggcggcguguggagagagaugcaccaccugguggaguucgagcccccccacgccgccaccaucagagugcuggcccugggcaaccaggagggcagccugaagaccgcccugaccggcgccaugagagugaccaaggacaccaacgacaacaaccuguacaagcugcacggcggccacgugagcugcagagugaagcugagcgcccugacccugaagggcaccagcuacaagaucugcaccgacaagauguucuucgugaagaaccccaccgacaccggccacggcaccguggugaugcaggugaaggugagcaagggcgcccccugcagaauccccgugaucguggccgacgaccugaccgccgccaucaacaagggcauccuggugaccgugaaccccaucgccagcaccaacgacgacgaggugcugaucgaggugaacccccccuucggcgacagcuacaucaucgugggcagaggcgacagcagacugaccuaccaguggcacaaggagggcagcagcaucggcaagcuguucacccagaccaugaagggcguggagagacuggccgugaugggcgacaccgccugggacuucagcagcgccggcggcuucuucaccagcgugggcaagggcauccacaccguguucggcagcgccuuccagggccuguucggcggccugaacuggaucaccaaggugaucaugggcgccgugcugaucugggugggcaucaacaccagaaacaugaccaugagcaugagcaugauccuggugggcgugaucaugauguuccugagccugggcgugggcgccugaggacuagucccuguucccagagcccacuuuuuuuucuuuuuuugaaauaaaauagccugucuuucagaucuaaaaaaaaaaaaaaaaaaaaaaaaaaaaaaaaaaaaaaaaaaaaaaaaaaaaaaaaaaaaaaaaugcaucccccccccccccccccccccccccccccccaaaggcucuuuucagagccaccagaauu

SEQ ID NO: 1636 - RNA, 2343 nt, Artificial Sequence
  mRNA product Design a-1 comprising derived and/or modified sequence from YFV__NC_002031.1__SSjev(V3)-prME-XX (polyprotein: aa122-788) (opt4)
gggagagucccgcagucggcguccagcggcucugcuuguucgugugugugucguugcaggccuuauucaagcuuaccaugaacgagggcagcaucauguggcuggccagccuggccguggugaucgccugcgccggcgccgugacccuggugagaaagaacagauggcugcugcugaacgugaccagcgaggaccugggcaagaccuucagcgugggcaccggcaacugcaccaccaacauccuggaggccaaguacuggugccccgacagcauggaguacaacugccccaaccugagccccagagaggagcccgacgacaucgacugcuggugcuacggcguggagaacgugagaguggccuacggcaagugcgacagcgccggcagaagcagaagaagcagaagagccaucgaccugcccacccacgagaaccacggccugaagaccagacaggagaaguggaugaccggcagaaugggcgagagacagcugcagaagaucgagagaugguucgugagaaaccccuucuucgccgugaccgcccugaccaucgccuaccuggugggcagcaacaugacccagagaguggugaucgcccugcuggugcuggccgugggccccgccuacagcgcccacugcaucggcaucaccgacagagacuucaucgagggcgugcacggcggcaccugggugagcgccacccuggagcaggacaagugcgugaccgugauggcccccgacaagcccagccuggacaucagccuggagaccguggccaucgacagacccgccgaggugagaaaggugugcuacaacgccgugcugacccacgugaagaucaacgacaagugccccagcaccggcgaggcccaccuggccgaggagaacgagggcgacaacgccugcaagagaaccuacagcgacagaggcuggggcaacggcugcggccuguucggcaagggcagcaucguggccugcgccaaguucaccugcgccaagagcaugagccuguucgagguggaccagaccaagauccaguacgugaucagagcccagcugcacgugggcgccaagcaggagaacuggaacaccgacaucaagacccugaaguucgacgcccugagcggcagccaggagguggaguucaucggcuacggcaaggccacccuggagugccaggugcagaccgccguggacuucggcaacagcuacaucgccgagauggagaccgagagcuggaucguggacagacagugggcccaggaccugacccugcccuggcagagcggcagcggcggcguguggagagagaugcaccaccugguggaguucgagcccccccacgccgccaccaucagagugcuggcccugggcaaccaggagggcagccugaagaccgcccugaccggcgccaugagagugaccaaggacaccaacgacaacaaccuguacaagcugcacggcggccacgugagcugcagagugaagcugagcgcccugacccugaagggcaccagcuacaagaucugcaccgacaagauguucuucgugaagaaccccaccgacaccggccacggcaccguggugaugcaggugaaggugagcaagggcgcccccugcagaauccccgugaucguggccgacgaccugaccgccgccaucaacaagggcauccuggugaccgugaaccccaucgccagcaccaacgacgacgaggugcugaucgaggugaacccccccuucggcgacagcuacaucaucgugggcagaggcgacagcagacugaccuaccaguggcacaaggagggcagcagcaucggcaagcuguucacccagaccaugaagggcguggagagacuggccgugaugggcgacaccgccugggacuucagcagcgccggcggcuucuucaccagcgugggcaagggcauccacaccguguucggcagcgccuuccagggccuguucggcggccugaacuggaucaccaaggugaucaugggcgccgugcugaucugggugggcaucaacaccagaaacaugaccaugagcaugagcaugauccuggugggcgugaucaugauguuccugagccugggcgugggcgccgaccagggcugcgccaucaacuucggcaagugaggacuagucccuguucccagagcccacuuuuuuuucuuuuuuugaaauaaaauagccugucuuucagaucuaaaaaaaaaaaaaaaaaaaaaaaaaaaaaaaaaaaaaaaaaaaaaaaaaaaaaaaaaaaaaaaaugcaucccccccccccccccccccccccccccccccaaaggcucuuuucagagccaccagaauu

SEQ ID NO: 1637 - RNA, 2352 nt, Artificial Sequence
  mRNA product Design a-1 comprising derived and/or modified sequence from YFV__NC_002031.1__X-SS-prMEdelstem_TM-JEV (polyprotein: aa92-681) (opt5)
gggagagucccgcagucggcguccagcggcucugcuuguucgugugugugucguugcaggccuuauucaagcuuaccaugagaggccugagcucccggaagcgcagaucucacgacgugcucaccguccaguuccugauccuugggaugcugcucaugacaggaggcguuacgcuggugcggaaaaaccgcuggcuucugcucaaugugaccagcgaggaucuggggaagacauuuuccgucggaaccggcaacugcacaaccaauauucuggaagccaaauacuggugucccgacucuauggaguauaacugcccuaaucucagcccgagagaagaacccgaugacaucgauuguuggugcuacgggguggaaaacguucggguggcuuauggaaagugugacuccgccggccgcucuagacggagccgcagagcgauugaucugccuacacaugagaaucacggccuuaaaacccggcaagagaaguggaugacggggcgcaugggagaaagacagcugcagaagaucgagcggugguucguccgcaaccccuuuuucgcugugaccgcccucacaauugccuaccugguuggcuccaauaugacccagagaguggucaucgcccuucuggugcucgcuguggggccugcuuauagcgcccauugcaucggaauuacagaccgggauuuuaucgaaggcguccacgggggaaccuggguuucugcgacgcuggagcaagacaaaugugugacagugauggcccccgauaagccuucccuggacauuagccucgagaccgucgcuaucgauagaccggccgaagugcgcaaaguuugcuacaacgcugugcugacacaugucaagauuaaugacaaaugucccucuaccggcgaggcccaccuugcggaagagaacgaaggcgacaaugccugcaagcggaccuauuccgauagaggguggggaaacggcugugggcuguucggaaagggcagcaucguggcuugcgccaaauuuacaugcgcuaagucuaugucccucuucgagguugaccagacgaaaauucaguacgugauccgcgcccagcugcacgucggggccaagcaagagaauuggaacaccgauaucaaaacacuuaaguuugacgcucugagcggaucccaggaaguggaguucauuggcuacggcaaagcgacccucgaaugucagguccagacagccguggauuuugggaacucuuauaucgcugagauggaaaccgagagcuggauuguugaccggcaaugggcccaggaucugacgcugccuuggcaguccggaagcggcgggguguggagagagaugcaucaccucgucgaguucgagcccccucaugccgcuacaauccgcgugcuggcccuuggaaaucaagaaggcucucugaagaccgcgcucaccggggcuaugcggguuacaaaggacaccaacgauaauaaccuguacaaacuucacggcggacacguguccugcagagucaagcugagcgcccucacacugaaaggcacgucuuauaagauuuguaccgacaaaauguuuuucgugaagaaucccacagauaccgggcauggaacagugguuaugcaggucaaggugagcaaaggcgccccgugccgcaucccugugaucgucgcugacgaccugaccgccgcuauuaacaaggggauccucgugacgguuaaucccauugccuccaccaacgaugacgaggugcugaucgaagucaauccucccuucggagauucuuacauuaucgugggccggggagacagcagacuuacauaucaguggcacaaagagggcuccagcaucggcagcacccuggggaaggccuucuccacaacgcucaaaggagcucagagacuggccgcgcuuggcgacaccgcuugggauuuugggucuaucggaggcguguucaacagcauugggcgggccguccaccaaguuuuuggaggcgccuuccgcacacuguuuggcgggauguccuggaucacccagggacucaugggcgcucugcuucuguggaugggggugaaugccagagaccggucuauugcucucgccuuccuggcgacaggaggcgugcuggucuuucucgccaccaacgugcaugcuugaggacuagucccuguucccagagcccacuuuuuuuucuuuuuuugaaauaaaauagccugucuuucagaucuaaaaaaaaaaaaaaaaaaaaaaaaaaaaaaaaaaaaaaaaaaaaaaaaaaaaaaaaaaaaaaaaugcaucccccccccccccccccccccccccccccccaaaggcucuuuucagagccaccagaauu

SEQ ID NO: 1638 - RNA, 2325 nt, Artificial Sequence
  mRNA product Design a-1 comprising derived and/or modified sequence from YFV__NC_002031.1__SSjev(V3)-prMEdelstem_TM-JEV (polyprotein: aa122-681) (opt5)
gggagagucccgcagucggcguccagcggcucugcuuguucgugugugugucguugcaggccuuauucaagcuuaccaugaacgagggcagcaucauguggcuggccucccucgcuguggucauugccugcgcgggggcuguuacgcuggugcggaaaaaccgcuggcuucugcucaaugugaccagcgaggaucuggggaagacauuuuccgucggaaccggcaacugcacaaccaauauucuggaagccaaauacuggugucccgacucuauggaguauaacugcccuaaucucagcccgagagaagaacccgaugacaucgauuguuggugcuacgggguggaaaacguucggguggcuuauggaaagugugacuccgccggccgcucuagacggagccgcagagcgauugaucugccuacacaugagaaucacggccuuaaaacccggcaagagaaguggaugacggggcgcaugggagaaagacagcugcagaagaucgagcggugguucguccgcaaccccuuuuucgcugugaccgcccucacaauugccuaccugguuggcuccaauaugacccagagaguggucaucgcccuucuggugcucgcuguggggccugcuuauagcgcccauugcaucggaauuacagaccgggauuuuaucgaaggcguccacgggggaaccuggguuucugcgacgcuggagcaagacaaaugugugacagugauggcccccgauaagccuucccuggacauuagccucgagaccgucgcuaucgauagaccggccgaagugcgcaaaguuugcuacaacgcugugcugacacaugucaagauuaaugacaaaugucccucuaccggcgaggcccaccuugcggaagagaacgaaggcgacaaugccugcaagcggaccuauuccgauagaggguggggaaacggcugugggcuguucggaaagggcagcaucguggcuugcgccaaauuuacaugcgcuaagucuaugucccucuucgagguugaccagacgaaaauucaguacgugauccgcgcccagcugcacgucggggccaagcaagagaauuggaacaccgauaucaaaacacuuaaguuugacgcucugagcggaucccaggaaguggaguucauuggcuacggcaaagcgacccucgaaugucagguccagacagccguggauuuugggaacucuuauaucgcugagauggaaaccgagagcuggauuguugaccggcaaugggcccaggaucugacgcugccuuggcaguccggaagcggcgggguguggagagagaugcaucaccucgucgaguucgagcccccucaugccgcuacaauccgcgugcuggcccuuggaaaucaagaaggcucucugaagaccgcgcucaccggggcuaugcggguuacaaaggacaccaacgauaauaaccuguacaaacuucacggcggacacguguccugcagagucaagcugagcgcccucacacugaaaggcacgucuuauaagauuuguaccgacaaaauguuuuucgugaagaaucccacagauaccgggcauggaacagugguuaugcaggucaaggugagcaaaggcgccccgugccgcaucccugugaucgucgcugacgaccugaccgccgcuauuaacaaggggauccucgugacgguuaaucccauugccuccaccaacgaugacgaggugcugaucgaagucaauccucccuucggagauucuuacauuaucgugggccggggagacagcagacuuacauaucaguggcacaaagagggcuccagcaucggcagcacccuggggaaggccuucuccacaacgcucaaaggagcucagagacuggccgcgcuuggcgacaccgcuugggauuuugggucuaucggaggcguguucaacagcauugggcgggccguccaccaaguuuuuggaggcgccuuccgcacacuguuuggcgggauguccuggaucacccagggacucaugggcgcucugcuucuguggaugggggugaaugccagagaccggucuauugcucucgccuuccuggcgacaggaggcgugcuggucuuucucgccaccaacgugcaugcuugaggacuagucccuguucccagagcccacuuuuuuuucuuuuuuugaaauaaaauagccugucuuucagaucuaaaaaaaaaaaaaaaaaaaaaaaaaaaaaaaaaaaaaaaaaaaaaaaaaaaaaaaaaaaaaaaaugcaucccccccccccccccccccccccccccccccaaaggcucuuuucagagccaccagaauu

SEQ ID NO: 1639 - RNA, 2340 nt, Artificial Sequence
  mRNA product Design a-1 comprising derived and/or modified sequence from YFV__NC_002031.1__X-SS-prME (polyprotein: aa92-778) (opt5)
gggagagucccgcagucggcguccagcggcucugcuuguucgugugugugucguugcaggccuuauucaagcuuaccaugagaggccugagcucccggaagcgcagaucucacgacgugcucaccguccaguuccugauccuugggaugcugcucaugacaggaggcguuacgcuggugcggaaaaaccgcuggcuucugcucaaugugaccagcgaggaucuggggaagacauuuuccgucggaaccggcaacugcacaaccaauauucuggaagccaaauacuggugucccgacucuauggaguauaacugcccuaaucucagcccgagagaagaacccgaugacaucgauuguuggugcuacgggguggaaaacguucggguggcuuauggaaagugugacuccgccggccgcucuagacggagccgcagagcgauugaucugccuacacaugagaaucacggccuuaaaacccggcaagagaaguggaugacggggcgcaugggagaaagacagcugcagaagaucgagcggugguucguccgcaaccccuuuuucgcugugaccgcccucacaauugccuaccugguuggcuccaauaugacccagagaguggucaucgcccuucuggugcucgcuguggggccugcuuauagcgcccauugcaucggaauuacagaccgggauuuuaucgaaggcguccacgggggaaccuggguuucugcgacgcuggagcaagacaaaugugugacagugauggcccccgauaagccuucccuggacauuagccucgagaccgucgcuaucgauagaccggccgaagugcgcaaaguuugcuacaacgcugugcugacacaugucaagauuaaugacaaaugucccucuaccggcgaggcccaccuugcggaagagaacgaaggcgacaaugccugcaagcggaccuauuccgauagaggguggggaaacggcugugggcuguucggaaagggcagcaucguggcuugcgccaaauuuacaugcgcuaagucuaugucccucuucgagguugaccagacgaaaauucaguacgugauccgcgcccagcugcacgucggggccaagcaagagaauuggaacaccgauaucaaaacacuuaaguuugacgcucugagcggaucccaggaaguggaguucauuggcuacggcaaagcgacccucgaaugucagguccagacagccguggauuuugggaacucuuauaucgcugagauggaaaccgagagcuggauuguugaccggcaaugggcccaggaucugacgcugccuuggcaguccggaagcggcgggguguggagagagaugcaucaccucgucgaguucgagcccccucaugccgcuacaauccgcgugcuggcccuuggaaaucaagaaggcucucugaagaccgcgcucaccggggcuaugcggguuacaaaggacaccaacgauaauaaccuguacaaacuucacggcggacacguguccugcagagucaagcugagcgcccucacacugaaaggcacgucuuauaagauuuguaccgacaaaauguuuuucgugaagaaucccacagauaccgggcauggaacagugguuaugcaggucaaggugagcaaaggcgccccgugccgcaucccugugaucgucgcugacgaccugaccgccgcuauuaacaaggggauccucgugacgguuaaucccauugccuccaccaacgaugacgaggugcugaucgaagucaauccucccuucggagauucuuacauuaucgugggccggggagacagcagacuuacauaucaguggcacaaagagggcuccagcaucggaaagcuguuuacccagacaaugaaaggcguugagcgccucgcggugaugggggauaccgccugggacuucucuuccgcuggaggcuuuuucacgagcgucgggaaggggauucauacaguguuuggcucugccuuccaagggcuguuuggcggacugaacuggaucaccaagguuauuaugggcgcugugcuuaucugggucgggauuaauacacggaacaugaccauguccaugagcaugauccucgugggagugauuaugauguuccugucccugggcgucggggccugaggacuagucccuguucccagagcccacuuuuuuuucuuuuuuugaaauaaaauagccugucuuucagaucuaaaaaaaaaaaaaaaaaaaaaaaaaaaaaaaaaaaaaaaaaaaaaaaaaaaaaaaaaaaaaaaaugcaucccccccccccccccccccccccccccccccaaaggcucuuuucagagccaccagaauu

SEQ ID NO: 1640 - RNA, 2343 nt, Artificial Sequence
  mRNA product Design a-1 comprising derived and/or modified sequence from YFV__NC_002031.1__SSjev(V3)-prME-XX (polyprotein: aa122-788) (opt5)
gggagagucccgcagucggcguccagcggcucugcuuguucgugugugugucguugcaggccuuauucaagcuuaccaugaacgagggcagcaucauguggcuggccucccucgcuguggucauugccugcgcgggggcuguuacgcuggugcggaaaaaccgcuggcuucugcucaaugugaccagcgaggaucuggggaagacauuuuccgucggaaccggcaacugcacaaccaauauucuggaagccaaauacuggugucccgacucuauggaguauaacugcccuaaucucagcccgagagaagaacccgaugacaucgauuguuggugcuacgggguggaaaacguucggguggcuuauggaaagugugacuccgccggccgcucuagacggagccgcagagcgauugaucugccuacacaugagaaucacggccuuaaaacccggcaagagaaguggaugacggggcgcaugggagaaagacagcugcagaagaucgagcggugguucguccgcaaccccuuuuucgcugugaccgcccucacaauugccuaccugguuggcuccaauaugacccagagaguggucaucgcccuucuggugcucgcuguggggccugcuuauagcgcccauugcaucggaauuacagaccgggauuuuaucgaaggcguccacgggggaaccuggguuucugcgacgcuggagcaagacaaaugugugacagugauggcccccgauaagccuucccuggacauuagccucgagaccgucgcuaucgauagaccggccgaagugcgcaaaguuugcuacaacgcugugcugacacaugucaagauuaaugacaaaugucccucuaccggcgaggcccaccuugcggaagagaacgaaggcgacaaugccugcaagcggaccuauuccgauagaggguggggaaacggcugugggcuguucggaaagggcagcaucguggcuugcgccaaauuuacaugcgcuaagucuaugucccucuucgagguugaccagacgaaaauucaguacgugauccgcgcccagcugcacgucggggccaagcaagagaauuggaacaccgauaucaaaacacuuaaguuugacgcucugagcggaucccaggaaguggaguucauuggcuacggcaaagcgacccucgaaugucagguccagacagccguggauuuugggaacucuuauaucgcugagauggaaaccgagagcuggauuguugaccggcaaugggcccaggaucugacgcugccuuggcaguccggaagcggcgggguguggagagagaugcaucaccucgucgaguucgagcccccucaugccgcuacaauccgcgugcuggcccuuggaaaucaagaaggcucucugaagaccgcgcucaccggggcuaugcggguuacaaaggacaccaacgauaauaaccuguacaaacuucacggcggacacguguccugcagagucaagcugagcgcccucacacugaaaggcacgucuuauaagauuuguaccgacaaaauguuuuucgugaagaaucccacagauaccgggcauggaacagugguuaugcaggucaaggugagcaaaggcgccccgugccgcaucccugugaucgucgcugacgaccugaccgccgcuauuaacaaggggauccucgugacgguuaaucccauugccuccaccaacgaugacgaggugcugaucgaagucaauccucccuucggagauucuuacauuaucgugggccggggagacagcagacuuacauaucaguggcacaaagagggcuccagcaucggaaagcuguuuacccagacaaugaaaggcguugagcgccucgcggugaugggggauaccgccugggacuucucuuccgcuggaggcuuuuucacgagcgucgggaaggggauucauacaguguuuggcucugccuuccaagggcuguuuggcggacugaacuggaucaccaagguuauuaugggcgcugugcuuaucugggucgggauuaauacacggaacaugaccauguccaugagcaugauccucgugggagugauuaugauguuccugucccugggcgucggggccgaucagggaugugcgaucaauuuuggcaaaugaggacuagucccuguucccagagcccacuuuuuuuucuuuuuuugaaauaaaauagccugucuuucagaucuaaaaaaaaaaaaaaaaaaaaaaaaaaaaaaaaaaaaaaaaaaaaaaaaaaaaaaaaaaaaaaaaugcaucccccccccccccccccccccccccccccccaaaggcucuuuucagagccaccagaauu

SEQ ID NO: 1641 - RNA, 2352 nt, Artificial Sequence
  mRNA product Design a-1 comprising derived and/or modified sequence from YFV__NC_002031.1__X-SS-prMEdelstem_TM-JEV (polyprotein: aa92-681) (opt6)
gggagagucccgcagucggcguccagcggcucugcuuguucgugugugugucguugcaggccuuauucaagcuuaccaugagaggauuaucaaguagaaaaagaagaucacaugauguacuaaccgugcaauuuuugaucuuagggaugcucuuaaugacaggagguguuacauuaguaagaaagaaucgauggcugcuuuuaaaugugacaucagaggauuuagggaaaacauuuucgguaggaacaggaaauuguacuacaaauauacuugaagcaaaauauuggugcccagacucuauggaauauaauuguccaaauuuaaguccuagagaagaaccugacgauauagauuguugguguuaugguguagaaaauguaagaguagcauacggcaaaugcgauagugcaggacguucuagacguucaaggagagccauagaucugcccacucacgaaaaucacggauugaaaacacgacaagaaaaauggaugacugggcgaaugggagaaagacaacuacagaaaauugaaagaugguucguuagaaauccauucuuugccguaacagcuuuaacaauagccuauuuaguagguaguaauaugacacaaagaguaguaauagcauugcuaguguuagcaguuggaccagcuuauagugcacauugcauaggaauaacagauagagacuuuauagaaggaguacacgggggaacuuggguaagugccacuuuagaacaagauaaauguguuacagugauggcgccagauaaaccaagucuggacauaaguuuggaaacaguagcgauugauagacccgcagaaguaagaaaaguuuguuauaaugcuguucuaacccauguuaaaauaaaugauaaaugcccuagcaccggagaagcccaucuagcagaagaaaaugaaggagauaacgcauguaaacgaacauacucagauagaggauggggcaacggauguggcuuguuuggaaaagguagcauaguagcaugcgcuaaauuuacaugcgcaaagucaaugucauuauuugaaguagaucaaacaaaaauacaauauguaauaagagcucaauuacacgugggugcaaaacaagaaaauuggaauacagacauaaagacacuaaaguucgacgcauuaaguggaucacaagagguagaauuuauaggguacggaaaagcgacuuuagagugucaaguccaaacagcaguagauuucgguaacucauacauagcagaaauggaaacugaaaguuggauaguagauagacaaugggcacaagacuugacacuaccuuggcaaucaggaagcggaggaguauggagagaaaugcaucauuuaguagaauuugaaccaccucaugcagcaacaauaagaguauuagcccuaggaaaccaagaaggaaguuuaaaaacagcacuaacaggagcuaugagaguaacaaaagauacaaaugacaacaaucuauacaaauuacacggaggacauguaagcugccggguaaaguugagcgcacuaacauuaaaaggaacgaguuauaaaauaugcacagauaaaauguucuuuguuaaaaauccuacagauaccggucauggaacaguaguaaugcaaguaaaaguaaguaaaggcgcucccuguagaauaccuguaauagucgcagacgauuuaaccgcagcaauaaauaaaggaauauuagucacgguaaacccaauagcgucaacaaaugaugaugaaguauuaauagaaguuaacccaccuuuuggagacaguuauauaauagucggaaggggugauaguagacuaacauaccaauggcauaaagaaggaagcucaauaggaaguacacuaggaaaagcauuuaguacaacauuaaaaggagcacaaagauuagcagcauuaggagauacagcaugggauuuuggaagcauaggaggaguauuuaauaguauagguagagcaguacaucaaguauuuggaggagcauuuagaacauuauuuggaggaaugaguuggauaacacaaggauuaaugggagcauuauuauuauggaugggaguaaaugcaagagauagaaguauagcauuagcauuuuuagcaacaggaggaguauuaguauuuuuagcaacaaauguacaugcaugaggacuagucccuguucccagagcccacuuuuuuuucuuuuuuugaaauaaaauagccugucuuucagaucuaaaaaaaaaaaaaaaaaaaaaaaaaaaaaaaaaaaaaaaaaaaaaaaaaaaaaaaaaaaaaaaaugcaucccccccccccccccccccccccccccccccaaaggcucuuuucagagccaccagaauu

SEQ ID NO: 1642 - RNA, 2325 nt, Artificial Sequence
  mRNA product Design a-1 comprising derived and/or modified sequence from YFV__NC_002031.1__SSjev(V3)-prMEdelstem_TM-JEV (polyprotein: aa122-681) (opt6)
gggagagucccgcagucggcguccagcggcucugcuuguucgugugugugucguugcaggccuuauucaagcuuaccaugaaugaagguucaauuaugugguuggcaucauuagcaguuguaauugcaugugcuggugcaguuacauuaguaagaaagaaucgauggcugcuuuuaaaugugacaucagaggauuuagggaaaacauuuucgguaggaacaggaaauuguacuacaaauauacuugaagcaaaauauuggugcccagacucuauggaauauaauuguccaaauuuaaguccuagagaagaaccugacgauauagauuguugguguuaugguguagaaaauguaagaguagcauacggcaaaugcgauagugcaggacguucuagacguucaaggagagccauagaucugcccacucacgaaaaucacggauugaaaacacgacaagaaaaauggaugacugggcgaaugggagaaagacaacuacagaaaauugaaagaugguucguuagaaauccauucuuugccguaacagcuuuaacaauagccuauuuaguagguaguaauaugacacaaagaguaguaauagcauugcuaguguuagcaguuggaccagcuuauagugcacauugcauaggaauaacagauagagacuuuauagaaggaguacacgggggaacuuggguaagugccacuuuagaacaagauaaauguguuacagugauggcgccagauaaaccaagucuggacauaaguuuggaaacaguagcgauugauagacccgcagaaguaagaaaaguuuguuauaaugcuguucuaacccauguuaaaauaaaugauaaaugcccuagcaccggagaagcccaucuagcagaagaaaaugaaggagauaacgcauguaaacgaacauacucagauagaggauggggcaacggauguggcuuguuuggaaaagguagcauaguagcaugcgcuaaauuuacaugcgcaaagucaaugucauuauuugaaguagaucaaacaaaaauacaauauguaauaagagcucaauuacacgugggugcaaaacaagaaaauuggaauacagacauaaagacacuaaaguucgacgcauuaaguggaucacaagagguagaauuuauaggguacggaaaagcgacuuuagagugucaaguccaaacagcaguagauuucgguaacucauacauagcagaaauggaaacugaaaguuggauaguagauagacaaugggcacaagacuugacacuaccuuggcaaucaggaagcggaggaguauggagagaaaugcaucauuuaguagaauuugaaccaccucaugcagcaacaauaagaguauuagcccuaggaaaccaagaaggaaguuuaaaaacagcacuaacaggagcuaugagaguaacaaaagauacaaaugacaacaaucuauacaaauuacacggaggacauguaagcugccggguaaaguugagcgcacuaacauuaaaaggaacgaguuauaaaauaugcacagauaaaauguucuuuguuaaaaauccuacagauaccggucauggaacaguaguaaugcaaguaaaaguaaguaaaggcgcucccuguagaauaccuguaauagucgcagacgauuuaaccgcagcaauaaauaaaggaauauuagucacgguaaacccaauagcgucaacaaaugaugaugaaguauuaauagaaguuaacccaccuuuuggagacaguuauauaauagucggaaggggugauaguagacuaacauaccaauggcauaaagaaggaagcucaauaggaaguacacuaggaaaagcauuuaguacaacauuaaaaggagcacaaagauuagcagcauuaggagauacagcaugggauuuuggaagcauaggaggaguauuuaauaguauagguagagcaguacaucaaguauuuggaggagcauuuagaacauuauuuggaggaaugaguuggauaacacaaggauuaaugggagcauuauuauuauggaugggaguaaaugcaagagauagaaguauagcauuagcauuuuuagcaacaggaggaguauuaguauuuuuagcaacaaauguacaugcaugaggacuagucccuguucccagagcccacuuuuuuuucuuuuuuugaaauaaaauagccugucuuucagaucuaaaaaaaaaaaaaaaaaaaaaaaaaaaaaaaaaaaaaaaaaaaaaaaaaaaaaaaaaaaaaaaaugcaucccccccccccccccccccccccccccccccaaaggcucuuuucagagccaccagaauu

SEQ ID NO: 1643 - RNA, 2340 nt, Artificial Sequence
  mRNA product Design a-1 comprising derived and/or modified sequence from YFV__NC_002031.1__X-SS-prME (polyprotein: aa92-778) (opt6)
gggagagucccgcagucggcguccagcggcucugcuuguucgugugugugucguugcaggccuuauucaagcuuaccaugagaggauuaucaaguagaaaaagaagaucacaugauguacuaaccgugcaauuuuugaucuuagggaugcucuuaaugacaggagguguuacauuaguaagaaagaaucgauggcugcuuuuaaaugugacaucagaggauuuagggaaaacauuuucgguaggaacaggaaauuguacuacaaauauacuugaagcaaaauauuggugcccagacucuauggaauauaauuguccaaauuuaaguccuagagaagaaccugacgauauagauuguugguguuaugguguagaaaauguaagaguagcauacggcaaaugcgauagugcaggacguucuagacguucaaggagagccauagaucugcccacucacgaaaaucacggauugaaaacacgacaagaaaaauggaugacugggcgaaugggagaaagacaacuacagaaaauugaaagaugguucguuagaaauccauucuuugccguaacagcuuuaacaauagccuauuuaguagguaguaauaugacacaaagaguaguaauagcauugcuaguguuagcaguuggaccagcuuauagugcacauugcauaggaauaacagauagagacuuuauagaaggaguacacgggggaacuuggguaagugccacuuuagaacaagauaaauguguuacagugauggcgccagauaaaccaagucuggacauaaguuuggaaacaguagcgauugauagacccgcagaaguaagaaaaguuuguuauaaugcuguucuaacccauguuaaaauaaaugauaaaugcccuagcaccggagaagcccaucuagcagaagaaaaugaaggagauaacgcauguaaacgaacauacucagauagaggauggggcaacggauguggcuuguuuggaaaagguagcauaguagcaugcgcuaaauuuacaugcgcaaagucaaugucauuauuugaaguagaucaaacaaaaauacaauauguaauaagagcucaauuacacgugggugcaaaacaagaaaauuggaauacagacauaaagacacuaaaguucgacgcauuaaguggaucacaagagguagaauuuauaggguacggaaaagcgacuuuagagugucaaguccaaacagcaguagauuucgguaacucauacauagcagaaauggaaacugaaaguuggauaguagauagacaaugggcacaagacuugacacuaccuuggcaaucaggaagcggaggaguauggagagaaaugcaucauuuaguagaauuugaaccaccucaugcagcaacaauaagaguauuagcccuaggaaaccaagaaggaaguuuaaaaacagcacuaacaggagcuaugagaguaacaaaagauacaaaugacaacaaucuauacaaauuacacggaggacauguaagcugccggguaaaguugagcgcacuaacauuaaaaggaacgaguuauaaaauaugcacagauaaaauguucuuuguuaaaaauccuacagauaccggucauggaacaguaguaaugcaaguaaaaguaaguaaaggcgcucccuguagaauaccuguaauagucgcagacgauuuaaccgcagcaauaaauaaaggaauauuagucacgguaaacccaauagcgucaacaaaugaugaugaaguauuaauagaaguuaacccaccuuuuggagacaguuauauaauagucggaaggggugauaguagacuaacauaccaauggcauaaagaaggaagcucaauaggaaaauuauuuacucaaaccaugaaagguguagaaaggcuagcuguuaugggugacacagcaugggauuuuucaagcgcaggaggguucuuuacaucaguagguaaaggaauacauacaguauuuggaagugcauuucaaggauuauuuggugguuuaaauuggauaacaaaaguaauaaugggcgcaguuuuaauauggguagguauaaacacaagaaauaugacaaugucuaugaguaugauauuggucggaguaauaaugauguuuuuaucacuaggagugggugcaugaggacuagucccuguucccagagcccacuuuuuuuucuuuuuuugaaauaaaauagccugucuuucagaucuaaaaaaaaaaaaaaaaaaaaaaaaaaaaaaaaaaaaaaaaaaaaaaaaaaaaaaaaaaaaaaaaugcaucccccccccccccccccccccccccccccccaaaggcucuuuucagagccaccagaauu

SEQ ID NO: 1644 - RNA, 2343 nt, Artificial Sequence
  mRNA product Design a-1 comprising derived and/or modified sequence from YFV__NC_002031.1__SSjev(V3)-prME-XX (polyprotein: aa122-788) (opt6)
gggagagucccgcagucggcguccagcggcucugcuuguucgugugugugucguugcaggccuuauucaagcuuaccaugaaugaagguucaauuaugugguuggcaucauuagcaguuguaauugcaugugcuggugcaguuacauuaguaagaaagaaucgauggcugcuuuuaaaugugacaucagaggauuuagggaaaacauuuucgguaggaacaggaaauuguacuacaaauauacuugaagcaaaauauuggugcccagacucuauggaauauaauuguccaaauuuaaguccuagagaagaaccugacgauauagauuguugguguuaugguguagaaaauguaagaguagcauacggcaaaugcgauagugcaggacguucuagacguucaaggagagccauagaucugcccacucacgaaaaucacggauugaaaacacgacaagaaaaauggaugacugggcgaaugggagaaagacaacuacagaaaauugaaagaugguucguuagaaauccauucuuugccguaacagcuuuaacaauagccuauuuaguagguaguaauaugacacaaagaguaguaauagcauugcuaguguuagcaguuggaccagcuuauagugcacauugcauaggaauaacagauagagacuuuauagaaggaguacacgggggaacuuggguaagugccacuuuagaacaagauaaauguguuacagugauggcgccagauaaaccaagucuggacauaaguuuggaaacaguagcgauugauagacccgcagaaguaagaaaaguuuguuauaaugcuguucuaacccauguuaaaauaaaugauaaaugcccuagcaccggagaagcccaucuagcagaagaaaaugaaggagauaacgcauguaaacgaacauacucagauagaggauggggcaacggauguggcuuguuuggaaaagguagcauaguagcaugcgcuaaauuuacaugcgcaaagucaaugucauuauuugaaguagaucaaacaaaaauacaauauguaauaagagcucaauuacacgugggugcaaaacaagaaaauuggaauacagacauaaagacacuaaaguucgacgcauuaaguggaucacaagagguagaauuuauaggguacggaaaagcgacuuuagagugucaaguccaaacagcaguagauuucgguaacucauacauagcagaaauggaaacugaaaguuggauaguagauagacaaugggcacaagacuugacacuaccuuggcaaucaggaagcggaggaguauggagagaaaugcaucauuuaguagaauuugaaccaccucaugcagcaacaauaagaguauuagcccuaggaaaccaagaaggaaguuuaaaaacagcacuaacaggagcuaugagaguaacaaaagauacaaaugacaacaaucuauacaaauuacacggaggacauguaagcugccggguaaaguugagcgcacuaacauuaaaaggaacgaguuauaaaauaugcacagauaaaauguucuuuguuaaaaauccuacagauaccggucauggaacaguaguaaugcaaguaaaaguaaguaaaggcgcucccuguagaauaccuguaauagucgcagacgauuuaaccgcagcaauaaauaaaggaauauuagucacgguaaacccaauagcgucaacaaaugaugaugaaguauuaauagaaguuaacccaccuuuuggagacaguuauauaauagucggaaggggugauaguagacuaacauaccaauggcauaaagaaggaagcucaauaggaaaauuauuuacucaaaccaugaaagguguagaaaggcuagcuguuaugggugacacagcaugggauuuuucaagcgcaggaggguucuuuacaucaguagguaaaggaauacauacaguauuuggaagugcauuucaaggauuauuuggugguuuaaauuggauaacaaaaguaauaaugggcgcaguuuuaauauggguagguauaaacacaagaaauaugacaaugucuaugaguaugauauuggucggaguaauaaugauguuuuuaucacuaggagugggugcagaucaagguugcgcuauuaauuuuggaaaaugaggacuagucccuguucccagagcccacuuuuuuuucuuuuuuugaaauaaaauagccugucuuucagaucuaaaaaaaaaaaaaaaaaaaaaaaaaaaaaaaaaaaaaaaaaaaaaaaaaaaaaaaaaaaaaaaaugcaucccccccccccccccccccccccccccccccaaaggcucuuuucagagccaccagaauu

SEQ ID NO: 1645 - RNA, 2352 nt, Artificial Sequence
  mRNA product Design a-1 comprising derived and/or modified sequence from YFV__NC_002031.1__X-SS-prMEdelstem_TM-JEV (polyprotein: aa92-681) (opt11)
gggagagucccgcagucggcguccagcggcucugcuuguucgugugugugucguugcaggccuuauucaagcuuaccaugcggggacuaagcagcagaaaaagacgcagccacgaugugcucaccgugcaauuccucauacuggggaugcuccuaaugaccggaggcgugacccuaguaaggaaaaacagauggcuacuacuaaacguaaccucagaagaucuaggaaagacauuuucagucggcacaggcaacugcacaaccaacauacuagaagcaaaauauuggugcccagacagcauggaauacaacugucccaaccucagcccaagagaggaaccagacgacauagacugcugguguuacggaguagaaaacguaagaguggcauacggcaaaugcgacagcgcaggcaggagccgaagaucccgcagagccaucgacuugcccacgcacgaaaaccacggccucaaaacacgacaagaaaaauggaugacagggcgaaugggagaacgacagcuccagaaaauagaacgaugguucguccggaacccguucuucgcaguaacggcacuaacaaucgcauaccucguaggcagcaacaugacacaaagaguggucaucgcgcuacucguacuagcaguggggcccgcauacagugcacacugcauaggaaucacagaccgugacuucaucgaaggcguacacggaggaacguggguaagcgcgacacuggaacaagacaaaugcgugacaguaauggcaccagacaaaccaagccuagacauaucccuagaaacggucgccaucgaccgucccgcagaaguacgaaagguaugcuauaaugcaguccucacacacgucaaaauaaacgacaaaugccccagcacgggcgaagcacaccucgccgaagaaaacgaaggggauaacgcgugcaaacgcaccuacuccgacaggggauggggcaacggaugcggacuguucggaaaaggauccauagucgcaugcgcaaaauuuaccugcgcaaaaagcaugagcuuguucgagguagaccaaacgaagauccaauacguaauccgagcucaacuacacguuggggccaagcaagagaacuggaauacggacaucaaaacacuaaaauucgacgcacucuccggcucacaagaagucgaguucaucggcuacggcaaagcaacacuagaaugccaaguacaaacagcgguggacuucggcaacagcuacauagcagaaauggaaacagaaagcuggauaguagaccgacaaugggcacaagaccuaacucugccauggcaaagcggcucaggaggaguguggagagagaugcaccaccugguagaguucgaacccccacacgcagcaacaauaaggguacuggcacuaggcaaccaagaaggcagccuaaaaaccgcacucacaggagccaugcgcgugacgaaggacaccaacgacaacaaccucuacaaacuccacggagggcacguauccugccgcguaaaacuaucagcacuaacgcuaaaaggaacaagcuacaaaauaugcacagacaaaauguucuucgucaaaaaccccacagacacaggccacggcacagucguaaugcaagugaaggucagcaagggggcccccugccgaaucccagucauaguggcagacgaccucacggccgccaucaacaaagggauccugguaacagugaacccaauagcaucgaccaacgacgacgaaguccucauagaagugaaucccccguucggcgacagcuacaucaucguaggacgcggcgacucccgacugacguaccaauggcauaaagaaggcagcagcauugggagcacgcucgggaaagcguucucgaccacgcucaagggcgcgcaaaggcucgcggccuugggcgauaccgcgugggauuucgggagcauaggcggggucuuuaacucgaucgggcgcgcgguccaucaaguguucgggggcgcguucaggaccuuguucgggggcaugagcuggaucacgcaagggcucaugggcgcgcucuugcucuggaugggggucaaugccagggacaggagcauagccuuggccuuucucgcgaccgggggcgugcucguguucuuggccacgaacgugcacgcgugaggacuagucccuguucccagagcccacuuuuuuuucuuuuuuugaaauaaaauagccugucuuucagaucuaaaaaaaaaaaaaaaaaaaaaaaaaaaaaaaaaaaaaaaaaaaaaaaaaaaaaaaaaaaaaaaaugcaucccccccccccccccccccccccccccccccaaaggcucuuuucagagccaccagaauu

SEQ ID NO: 1646 - RNA, 2325 nt, Artificial Sequence
  mRNA product Design a-1 comprising derived and/or modified sequence from YFV__NC_002031.1__SSjev(V3)-prMEdelstem_TM-JEV (polyprotein: aa122-681) (opt11)
gggagagucccgcagucggcguccagcggcucugcuuguucgugugugugucguugcaggccuuauucaagcuuaccaugaacgagggcucgaucaugugguuggccucgcucgcggucgugaucgcgugcgcgggcgcggugacccuaguaaggaaaaacagauggcuacuacuaaacguaaccucagaagaucuaggaaagacauuuucagucggcacaggcaacugcacaaccaacauacuagaagcaaaauauuggugcccagacagcauggaauacaacugucccaaccucagcccaagagaggaaccagacgacauagacugcugguguuacggaguagaaaacguaagaguggcauacggcaaaugcgacagcgcaggcaggagccgaagaucccgcagagccaucgacuugcccacgcacgaaaaccacggccucaaaacacgacaagaaaaauggaugacagggcgaaugggagaacgacagcuccagaaaauagaacgaugguucguccggaacccguucuucgcaguaacggcacuaacaaucgcauaccucguaggcagcaacaugacacaaagaguggucaucgcgcuacucguacuagcaguggggcccgcauacagugcacacugcauaggaaucacagaccgugacuucaucgaaggcguacacggaggaacguggguaagcgcgacacuggaacaagacaaaugcgugacaguaauggcaccagacaaaccaagccuagacauaucccuagaaacggucgccaucgaccgucccgcagaaguacgaaagguaugcuauaaugcaguccucacacacgucaaaauaaacgacaaaugccccagcacgggcgaagcacaccucgccgaagaaaacgaaggggauaacgcgugcaaacgcaccuacuccgacaggggauggggcaacggaugcggacuguucggaaaaggauccauagucgcaugcgcaaaauuuaccugcgcaaaaagcaugagcuuguucgagguagaccaaacgaagauccaauacguaauccgagcucaacuacacguuggggccaagcaagagaacuggaauacggacaucaaaacacuaaaauucgacgcacucuccggcucacaagaagucgaguucaucggcuacggcaaagcaacacuagaaugccaaguacaaacagcgguggacuucggcaacagcuacauagcagaaauggaaacagaaagcuggauaguagaccgacaaugggcacaagaccuaacucugccauggcaaagcggcucaggaggaguguggagagagaugcaccaccugguagaguucgaacccccacacgcagcaacaauaaggguacuggcacuaggcaaccaagaaggcagccuaaaaaccgcacucacaggagccaugcgcgugacgaaggacaccaacgacaacaaccucuacaaacuccacggagggcacguauccugccgcguaaaacuaucagcacuaacgcuaaaaggaacaagcuacaaaauaugcacagacaaaauguucuucgucaaaaaccccacagacacaggccacggcacagucguaaugcaagugaaggucagcaagggggcccccugccgaaucccagucauaguggcagacgaccucacggccgccaucaacaaagggauccugguaacagugaacccaauagcaucgaccaacgacgacgaaguccucauagaagugaaucccccguucggcgacagcuacaucaucguaggacgcggcgacucccgacugacguaccaauggcauaaagaaggcagcagcauugggagcacgcucgggaaagcguucucgaccacgcucaagggcgcgcaaaggcucgcggccuugggcgauaccgcgugggauuucgggagcauaggcggggucuuuaacucgaucgggcgcgcgguccaucaaguguucgggggcgcguucaggaccuuguucgggggcaugagcuggaucacgcaagggcucaugggcgcgcucuugcucuggaugggggucaaugccagggacaggagcauagccuuggccuuucucgcgaccgggggcgugcucguguucuuggccacgaacgugcacgcgugaggacuagucccuguucccagagcccacuuuuuuuucuuuuuuugaaauaaaauagccugucuuucagaucuaaaaaaaaaaaaaaaaaaaaaaaaaaaaaaaaaaaaaaaaaaaaaaaaaaaaaaaaaaaaaaaaugcaucccccccccccccccccccccccccccccccaaaggcucuuuucagagccaccagaauu

SEQ ID NO: 1647 - RNA, 2340 nt, Artificial Sequence
  mRNA product Design a-1 comprising derived and/or modified sequence from YFV__NC_002031.1__X-SS-prME (polyprotein: aa92-778) (opt11)
gggagagucccgcagucggcguccagcggcucugcuuguucgugugugugucguugcaggccuuauucaagcuuaccaugcggggacuaagcagcagaaaaagacgcagccacgaugugcucaccgugcaauuccucauacuggggaugcuccuaaugaccggaggcgugacccuaguaaggaaaaacagauggcuacuacuaaacguaaccucagaagaucuaggaaagacauuuucagucggcacaggcaacugcacaaccaacauacuagaagcaaaauauuggugcccagacagcauggaauacaacugucccaaccucagcccaagagaggaaccagacgacauagacugcugguguuacggaguagaaaacguaagaguggcauacggcaaaugcgacagcgcaggcaggagccgaagaucccgcagagccaucgacuugcccacgcacgaaaaccacggccucaaaacacgacaagaaaaauggaugacagggcgaaugggagaacgacagcuccagaaaauagaacgaugguucguccggaacccguucuucgcaguaacggcacuaacaaucgcauaccucguaggcagcaacaugacacaaagaguggucaucgcgcuacucguacuagcaguggggcccgcauacagugcacacugcauaggaaucacagaccgugacuucaucgaaggcguacacggaggaacguggguaagcgcgacacuggaacaagacaaaugcgugacaguaauggcaccagacaaaccaagccuagacauaucccuagaaacggucgccaucgaccgucccgcagaaguacgaaagguaugcuauaaugcaguccucacacacgucaaaauaaacgacaaaugccccagcacgggcgaagcacaccucgccgaagaaaacgaaggggauaacgcgugcaaacgcaccuacuccgacaggggauggggcaacggaugcggacuguucggaaaaggauccauagucgcaugcgcaaaauuuaccugcgcaaaaagcaugagcuuguucgagguagaccaaacgaagauccaauacguaauccgagcucaacuacacguuggggccaagcaagagaacuggaauacggacaucaaaacacuaaaauucgacgcacucuccggcucacaagaagucgaguucaucggcuacggcaaagcaacacuagaaugccaaguacaaacagcgguggacuucggcaacagcuacauagcagaaauggaaacagaaagcuggauaguagaccgacaaugggcacaagaccuaacucugccauggcaaagcggcucaggaggaguguggagagagaugcaccaccugguagaguucgaacccccacacgcagcaacaauaaggguacuggcacuaggcaaccaagaaggcagccuaaaaaccgcacucacaggagccaugcgcgugacgaaggacaccaacgacaacaaccucuacaaacuccacggagggcacguauccugccgcguaaaacuaucagcacuaacgcuaaaaggaacaagcuacaaaauaugcacagacaaaauguucuucgucaaaaaccccacagacacaggccacggcacagucguaaugcaagugaaggucagcaagggggcccccugccgaaucccagucauaguggcagacgaccucacggccgccaucaacaaagggauccugguaacagugaacccaauagcaucgaccaacgacgacgaaguccucauagaagugaaucccccguucggcgacagcuacaucaucguaggacgcggcgacucccgacugacguaccaauggcauaaagaaggcagcagcauuggaaaacuauucacccaaaccaugaagggcgucgaaagacucgcggugaugggagacaccgcaugggacuucucgagcgcaggcggcuucuucacaagcguaggaaaagggauucacacaguauucggauccgcauuccaaggccucuucgggggacuaaacuggauaacgaaaguaauaaugggagcaguucucauauggguaggaaucaacacacgaaacaugacaauguccaugucaaugauacucguaggcguaaucaugauguuucugucacucggagugggagcaugaggacuagucccuguucccagagcccacuuuuuuuucuuuuuuugaaauaaaauagccugucuuucagaucuaaaaaaaaaaaaaaaaaaaaaaaaaaaaaaaaaaaaaaaaaaaaaaaaaaaaaaaaaaaaaaaaugcaucccccccccccccccccccccccccccccccaaaggcucuuuucagagccaccagaauu

SEQ ID NO: 1648 - RNA, 2343 nt, Artificial Sequence
  mRNA product Design a-1 comprising derived and/or modified sequence from YFV__NC_002031.1__SSjev(V3)-prME-XX (polyprotein: aa122-788) (opt11)
gggagagucccgcagucggcguccagcggcucugcuuguucgugugugugucguugcaggccuuauucaagcuuaccaugaacgagggcucgaucaugugguuggccucgcucgcggucgugaucgcgugcgcgggcgcggugacccuaguaaggaaaaacagauggcuacuacuaaacguaaccucagaagaucuaggaaagacauuuucagucggcacaggcaacugcacaaccaacauacuagaagcaaaauauuggugcccagacagcauggaauacaacugucccaaccucagcccaagagaggaaccagacgacauagacugcugguguuacggaguagaaaacguaagaguggcauacggcaaaugcgacagcgcaggcaggagccgaagaucccgcagagccaucgacuugcccacgcacgaaaaccacggccucaaaacacgacaagaaaaauggaugacagggcgaaugggagaacgacagcuccagaaaauagaacgaugguucguccggaacccguucuucgcaguaacggcacuaacaaucgcauaccucguaggcagcaacaugacacaaagaguggucaucgcgcuacucguacuagcaguggggcccgcauacagugcacacugcauaggaaucacagaccgugacuucaucgaaggcguacacggaggaacguggguaagcgcgacacuggaacaagacaaaugcgugacaguaauggcaccagacaaaccaagccuagacauaucccuagaaacggucgccaucgaccgucccgcagaaguacgaaagguaugcuauaaugcaguccucacacacgucaaaauaaacgacaaaugccccagcacgggcgaagcacaccucgccgaagaaaacgaaggggauaacgcgugcaaacgcaccuacuccgacaggggauggggcaacggaugcggacuguucggaaaaggauccauagucgcaugcgcaaaauuuaccugcgcaaaaagcaugagcuuguucgagguagaccaaacgaagauccaauacguaauccgagcucaacuacacguuggggccaagcaagagaacuggaauacggacaucaaaacacuaaaauucgacgcacucuccggcucacaagaagucgaguucaucggcuacggcaaagcaacacuagaaugccaaguacaaacagcgguggacuucggcaacagcuacauagcagaaauggaaacagaaagcuggauaguagaccgacaaugggcacaagaccuaacucugccauggcaaagcggcucaggaggaguguggagagagaugcaccaccugguagaguucgaacccccacacgcagcaacaauaaggguacuggcacuaggcaaccaagaaggcagccuaaaaaccgcacucacaggagccaugcgcgugacgaaggacaccaacgacaacaaccucuacaaacuccacggagggcacguauccugccgcguaaaacuaucagcacuaacgcuaaaaggaacaagcuacaaaauaugcacagacaaaauguucuucgucaaaaaccccacagacacaggccacggcacagucguaaugcaagugaaggucagcaagggggcccccugccgaaucccagucauaguggcagacgaccucacggccgccaucaacaaagggauccugguaacagugaacccaauagcaucgaccaacgacgacgaaguccucauagaagugaaucccccguucggcgacagcuacaucaucguaggacgcggcgacucccgacugacguaccaauggcauaaagaaggcagcagcauuggaaaacuauucacccaaaccaugaagggcgucgaaagacucgcggugaugggagacaccgcaugggacuucucgagcgcaggcggcuucuucacaagcguaggaaaagggauucacacaguauucggauccgcauuccaaggccucuucgggggacuaaacuggauaacgaaaguaauaaugggagcaguucucauauggguaggaaucaacacacgaaacaugacaauguccaugucaaugauacucguaggcguaaucaugauguuucugucacucggagugggagcagaccaagguugcgccauaaacuucggcaagugaggacuagucccuguucccagagcccacuuuuuuuucuuuuuuugaaauaaaauagccugucuuucagaucuaaaaaaaaaaaaaaaaaaaaaaaaaaaaaaaaaaaaaaaaaaaaaaaaaaaaaaaaaaaaaaaaugcaucccccccccccccccccccccccccccccccaaaggcucuuuucagagccaccagaauu

SEQ ID NO: 1649 - RNA, 2371 nt, Artificial Sequence
  mRNA product Design a-2 comprising derived and/or modified sequence from YFV__NC_002031.1__X-SS-prMEdelstem_TM-JEV (polyprotein: aa92-681) (wt)
gggagaguccgcucagccagguugcagaagcggcuuagcguguguccuaaucuucucucugcguguagguaggccugugccgcaaacaagcuuaccaugagaggauuguccucaaggaaacgccguucccaugauguucugacugugcaauuccuaauuuugggaaugcuguugaugacggguggagugaccuuggugcggaaaaacagaugguugcuccuaaaugugacaucugaggaccucgggaaaacauucucugugggcacaggcaacugcacaacaaacauuuuggaagccaaguacuggugcccagacucaauggaauacaacugucccaaucucaguccaagagaggagccagaugacauugauugcuggugcuaugggguggaaaacguuagagucgcauaugguaagugugacucagcaggcaggucuaggaggucaagaagggccauugacuugccuacgcaugaaaaccaugguuugaagacccggcaagaaaaauggaugacuggaagaaugggugaaaggcaacuccaaaagauugagagaugguucgugaggaaccccuuuuuugcagugacggcucugaccauugccuaccuugugggaagcaacaugacgcaacgagucgugauugcccuacuggucuuggcuguugguccggccuacucagcucacugcauuggaauuacugacagggauuucauugagggggugcauggaggaacuuggguuucagcuacccuggagcaagacaagugugucacuguuauggccccugacaagccuucauuggacaucucacuagagacaguagccauugauagaccugcugaggugaggaaaguguguuacaaugcaguucucacucaugugaagauuaaugacaagugccccagcacuggagaggcccaccuagcugaagagaacgaaggggacaaugcgugcaagcgcacuuauucugauagaggcuggggcaauggcuguggccuauuugggaaagggagcauuguggcaugcgccaaauucacuugugccaaauccaugaguuuguuugagguugaucagaccaaaauucaguaugucaucagagcacaauugcauguaggggccaagcaggaaaauuggaauaccgacauuaagacucucaaguuugaugcccugucaggcucccaggaagucgaguucauuggguauggaaaagcuacacuggaaugccaggugcaaacugcgguggacuuugguaacaguuacaucgcugagauggaaacagagagcuggauaguggacagacagugggcccaggacuugacccugccauggcagaguggaaguggcgggguguggagagagaugcaucaucuugucgaauuugaaccuccgcaugccgccacuaucagaguacuggcccugggaaaccaggaaggcuccuugaaaacagcucuuacuggcgcaaugaggguuacaaaggacacaaaugacaacaaccuuuacaaacuacaugguggacauguuucuugcagagugaaauugucagcuuugacacucaaggggacauccuacaaaauaugcacugacaaaauguuuuuugucaagaacccaacugacacuggccauggcacuguugugaugcaggugaaagugucaaaaggagcccccugcaggauuccagugauaguagcugaugaucuuacagcggcaaucaauaaaggcauuuugguuacaguuaaccccaucgccucaaccaaugaugaugaagugcugauugaggugaacccaccuuuuggagacagcuacauuaucguugggagaggagauucacgucucacuuaccaguggcacaaagagggaagcucaauaggcagcacgcugggcaaggccuuuucaacaacuuugaagggagcucaaagacuggcagcguugggcgacacagccugggacuuuggcucuauuggaggggucuucaacuccauaggaagagccguucaccaaguguuugguggugccuucagaacacucuuugggggaaugucuuggaucacacaagggcuaaugggugcccuacugcucuggaugggcgucaacgcacgagaccgaucaauugcuuuggccuucuuagccacaggaggugugcucguguucuuagcgaccaaugugcacgccuaaggacuagucccuguucccagagcccacuuuuuuuucuuuuuuugaaauaaaauagccugucuuucagaucuaaaaaaaaaaaaaaaaaaaaaaaaaaaaaaaaaaaaaaaaaaaaaaaaaaaaaaaaaaaaaaaaugcaucccccccccccccccccccccccccccccccaaaggcucuuuucagagccaccagaauu

SEQ ID NO: 1650 - RNA, 2344 nt, Artificial Sequence
  mRNA product Design a-2 comprising derived and/or modified sequence from YFV__NC_002031.1__SSjev(V3)-prMEdelstem_TM-JEV (polyprotein: aa122-681) (wt)
gggagaguccgcucagccagguugcagaagcggcuuagcguguguccuaaucuucucucugcguguagguaggccugugccgcaaacaagcuuaccaugaaugaaggcucaaucauguggcucgcgagcuuggcaguugucauagcuugugcaggagccgugaccuuggugcggaaaaacagaugguugcuccuaaaugugacaucugaggaccucgggaaaacauucucugugggcacaggcaacugcacaacaaacauuuuggaagccaaguacuggugcccagacucaauggaauacaacugucccaaucucaguccaagagaggagccagaugacauugauugcuggugcuaugggguggaaaacguuagagucgcauaugguaagugugacucagcaggcaggucuaggaggucaagaagggccauugacuugccuacgcaugaaaaccaugguuugaagacccggcaagaaaaauggaugacuggaagaaugggugaaaggcaacuccaaaagauugagagaugguucgugaggaaccccuuuuuugcagugacggcucugaccauugccuaccuugugggaagcaacaugacgcaacgagucgugauugcccuacuggucuuggcuguugguccggccuacucagcucacugcauuggaauuacugacagggauuucauugagggggugcauggaggaacuuggguuucagcuacccuggagcaagacaagugugucacuguuauggccccugacaagccuucauuggacaucucacuagagacaguagccauugauagaccugcugaggugaggaaaguguguuacaaugcaguucucacucaugugaagauuaaugacaagugccccagcacuggagaggcccaccuagcugaagagaacgaaggggacaaugcgugcaagcgcacuuauucugauagaggcuggggcaauggcuguggccuauuugggaaagggagcauuguggcaugcgccaaauucacuugugccaaauccaugaguuuguuugagguugaucagaccaaaauucaguaugucaucagagcacaauugcauguaggggccaagcaggaaaauuggaauaccgacauuaagacucucaaguuugaugcccugucaggcucccaggaagucgaguucauuggguauggaaaagcuacacuggaaugccaggugcaaacugcgguggacuuugguaacaguuacaucgcugagauggaaacagagagcuggauaguggacagacagugggcccaggacuugacccugccauggcagaguggaaguggcgggguguggagagagaugcaucaucuugucgaauuugaaccuccgcaugccgccacuaucagaguacuggcccugggaaaccaggaaggcuccuugaaaacagcucuuacuggcgcaaugaggguuacaaaggacacaaaugacaacaaccuuuacaaacuacaugguggacauguuucuugcagagugaaauugucagcuuugacacucaaggggacauccuacaaaauaugcacugacaaaauguuuuuugucaagaacccaacugacacuggccauggcacuguugugaugcaggugaaagugucaaaaggagcccccugcaggauuccagugauaguagcugaugaucuuacagcggcaaucaauaaaggcauuuugguuacaguuaaccccaucgccucaaccaaugaugaugaagugcugauugaggugaacccaccuuuuggagacagcuacauuaucguugggagaggagauucacgucucacuuaccaguggcacaaagagggaagcucaauaggcagcacgcugggcaaggccuuuucaacaacuuugaagggagcucaaagacuggcagcguugggcgacacagccugggacuuuggcucuauuggaggggucuucaacuccauaggaagagccguucaccaaguguuugguggugccuucagaacacucuuugggggaaugucuuggaucacacaagggcuaaugggugcccuacugcucuggaugggcgucaacgcacgagaccgaucaauugcuuuggccuucuuagccacaggaggugugcucguguucuuagcgaccaaugugcacgccuaaggacuagucccuguucccagagcccacuuuuuuuucuuuuuuugaaauaaaauagccugucuuucagaucuaaaaaaaaaaaaaaaaaaaaaaaaaaaaaaaaaaaaaaaaaaaaaaaaaaaaaaaaaaaaaaaaugcaucccccccccccccccccccccccccccccccaaaggcucuuuucagagccaccagaauu

SEQ ID NO: 1651 - RNA, 2359 nt, Artificial Sequence
  mRNA product Design a-2 comprising derived and/or modified sequence from YFV__NC_002031.1__X-SS-prME (polyprotein: aa92-778) (wt)
gggagaguccgcucagccagguugcagaagcggcuuagcguguguccuaaucuucucucugcguguagguaggccugugccgcaaacaagcuuaccaugagaggauuguccucaaggaaacgccguucccaugauguucugacugugcaauuccuaauuuugggaaugcuguugaugacggguggagugaccuuggugcggaaaaacagaugguugcuccuaaaugugacaucugaggaccucgggaaaacauucucugugggcacaggcaacugcacaacaaacauuuuggaagccaaguacuggugcccagacucaauggaauacaacugucccaaucucaguccaagagaggagccagaugacauugauugcuggugcuaugggguggaaaacguuagagucgcauaugguaagugugacucagcaggcaggucuaggaggucaagaagggccauugacuugccuacgcaugaaaaccaugguuugaagacccggcaagaaaaauggaugacuggaagaaugggugaaaggcaacuccaaaagauugagagaugguucgugaggaaccccuuuuuugcagugacggcucugaccauugccuaccuugugggaagcaacaugacgcaacgagucgugauugcccuacuggucuuggcuguugguccggccuacucagcucacugcauuggaauuacugacagggauuucauugagggggugcauggaggaacuuggguuucagcuacccuggagcaagacaagugugucacuguuauggccccugacaagccuucauuggacaucucacuagagacaguagccauugauagaccugcugaggugaggaaaguguguuacaaugcaguucucacucaugugaagauuaaugacaagugccccagcacuggagaggcccaccuagcugaagagaacgaaggggacaaugcgugcaagcgcacuuauucugauagaggcuggggcaauggcuguggccuauuugggaaagggagcauuguggcaugcgccaaauucacuugugccaaauccaugaguuuguuugagguugaucagaccaaaauucaguaugucaucagagcacaauugcauguaggggccaagcaggaaaauuggaauaccgacauuaagacucucaaguuugaugcccugucaggcucccaggaagucgaguucauuggguauggaaaagcuacacuggaaugccaggugcaaacugcgguggacuuugguaacaguuacaucgcugagauggaaacagagagcuggauaguggacagacagugggcccaggacuugacccugccauggcagaguggaaguggcgggguguggagagagaugcaucaucuugucgaauuugaaccuccgcaugccgccacuaucagaguacuggcccugggaaaccaggaaggcuccuugaaaacagcucuuacuggcgcaaugaggguuacaaaggacacaaaugacaacaaccuuuacaaacuacaugguggacauguuucuugcagagugaaauugucagcuuugacacucaaggggacauccuacaaaauaugcacugacaaaauguuuuuugucaagaacccaacugacacuggccauggcacuguugugaugcaggugaaagugucaaaaggagcccccugcaggauuccagugauaguagcugaugaucuuacagcggcaaucaauaaaggcauuuugguuacaguuaaccccaucgccucaaccaaugaugaugaagugcugauugaggugaacccaccuuuuggagacagcuacauuaucguugggagaggagauucacgucucacuuaccaguggcacaaagagggaagcucaauaggaaaguuguucacucagaccaugaaaggcguggaacgccuggccgucaugggagacaccgccugggauuucagcuccgcuggaggguucuucacuucgguugggaaaggaauccauacgguguuuggcucugccuuucaggggcuauuuggcggcuugaacuggauaacaaaggucaucaugggggcgguacuuauauggguuggcaucaacacaagaaacaugacaauguccaugagcaugaucuugguaggagugaucaugauguuuuugucucuaggaguuggggcguaaggacuagucccuguucccagagcccacuuuuuuuucuuuuuuugaaauaaaauagccugucuuucagaucuaaaaaaaaaaaaaaaaaaaaaaaaaaaaaaaaaaaaaaaaaaaaaaaaaaaaaaaaaaaaaaaaugcaucccccccccccccccccccccccccccccccaaaggcucuuuucagagccaccagaauu

SEQ ID NO: 1652 - RNA, 2362 nt, Artificial Sequence
  mRNA product Design a-2 comprising derived and/or modified sequence from YFV__NC_002031.1__SSjev(V3)-prME-XX (polyprotein: aa122-788) (wt)
gggagaguccgcucagccagguugcagaagcggcuuagcguguguccuaaucuucucucugcguguagguaggccugugccgcaaacaagcuuaccaugaaugaaggcucaaucauguggcucgcgagcuuggcaguugucauagcuugugcaggagccgugaccuuggugcggaaaaacagaugguugcuccuaaaugugacaucugaggaccucgggaaaacauucucugugggcacaggcaacugcacaacaaacauuuuggaagccaaguacuggugcccagacucaauggaauacaacugucccaaucucaguccaagagaggagccagaugacauugauugcuggugcuaugggguggaaaacguuagagucgcauaugguaagugugacucagcaggcaggucuaggaggucaagaagggccauugacuugccuacgcaugaaaaccaugguuugaagacccggcaagaaaaauggaugacuggaagaaugggugaaaggcaacuccaaaagauugagagaugguucgugaggaaccccuuuuuugcagugacggcucugaccauugccuaccuugugggaagcaacaugacgcaacgagucgugauugcccuacuggucuuggcuguugguccggccuacucagcucacugcauuggaauuacugacagggauuucauugagggggugcauggaggaacuuggguuucagcuacccuggagcaagacaagugugucacuguuauggccccugacaagccuucauuggacaucucacuagagacaguagccauugauagaccugcugaggugaggaaaguguguuacaaugcaguucucacucaugugaagauuaaugacaagugccccagcacuggagaggcccaccuagcugaagagaacgaaggggacaaugcgugcaagcgcacuuauucugauagaggcuggggcaauggcuguggccuauuugggaaagggagcauuguggcaugcgccaaauucacuugugccaaauccaugaguuuguuugagguugaucagaccaaaauucaguaugucaucagagcacaauugcauguaggggccaagcaggaaaauuggaauaccgacauuaagacucucaaguuugaugcccugucaggcucccaggaagucgaguucauuggguauggaaaagcuacacuggaaugccaggugcaaacugcgguggacuuugguaacaguuacaucgcugagauggaaacagagagcuggauaguggacagacagugggcccaggacuugacccugccauggcagaguggaaguggcgggguguggagagagaugcaucaucuugucgaauuugaaccuccgcaugccgccacuaucagaguacuggcccugggaaaccaggaaggcuccuugaaaacagcucuuacuggcgcaaugaggguuacaaaggacacaaaugacaacaaccuuuacaaacuacaugguggacauguuucuugcagagugaaauugucagcuuugacacucaaggggacauccuacaaaauaugcacugacaaaauguuuuuugucaagaacccaacugacacuggccauggcacuguugugaugcaggugaaagugucaaaaggagcccccugcaggauuccagugauaguagcugaugaucuuacagcggcaaucaauaaaggcauuuugguuacaguuaaccccaucgccucaaccaaugaugaugaagugcugauugaggugaacccaccuuuuggagacagcuacauuaucguugggagaggagauucacgucucacuuaccaguggcacaaagagggaagcucaauaggaaaguuguucacucagaccaugaaaggcguggaacgccuggccgucaugggagacaccgccugggauuucagcuccgcuggaggguucuucacuucgguugggaaaggaauccauacgguguuuggcucugccuuucaggggcuauuuggcggcuugaacuggauaacaaaggucaucaugggggcgguacuuauauggguuggcaucaacacaagaaacaugacaauguccaugagcaugaucuugguaggagugaucaugauguuuuugucucuaggaguuggggcggaucaaggaugcgccaucaacuuuggcaaguaaggacuagucccuguucccagagcccacuuuuuuuucuuuuuuugaaauaaaauagccugucuuucagaucuaaaaaaaaaaaaaaaaaaaaaaaaaaaaaaaaaaaaaaaaaaaaaaaaaaaaaaaaaaaaaaaaugcaucccccccccccccccccccccccccccccccaaaggcucuuuucagagccaccagaauu

SEQ ID NO: 1653 - RNA, 2371 nt, Artificial Sequence
  mRNA product Design a-2 comprising derived and/or modified sequence from YFV__NC_002031.1__X-SS-prMEdelstem_TM-JEV (polyprotein: aa92-681) (opt1)
gggagaguccgcucagccagguugcagaagcggcuuagcguguguccuaaucuucucucugcguguagguaggccugugccgcaaacaagcuuaccaugcggggccugagcucccgcaagcggcgcagccacgacgugcucaccguccaguuccugauccuggggaugcuccugaugaccggcggggugacgcuggugcggaagaaccgcuggcuccugcugaacgucaccuccgaggaccucggcaagaccuucagcguggggaccggcaacugcacgaccaacauccuggaggccaaguacuggugccccgacuccauggaguacaacugcccgaaccugagcccccgggaggagcccgacgacaucgacugcuggugcuacggcguggagaacguccgcguggccuacgggaagugcgacuccgcgggccggagccgccggucccgccgggccaucgaccuccccacccacgagaaccacgggcugaagacccgccaggagaaguggaugacgggccggaugggggagcgccagcugcagaagaucgagcggugguucgugcgcaacccguucuucgccgucaccgcccucaccaucgccuaccuggugggcagcaacaugacccagcggguggucaucgcgcugcucgugcuggccgugggccccgccuacuccgcccacugcaucgggaucacggaccgcgacuucaucgagggcguccacgggggcaccugggugagcgcgacccuggagcaggacaagugcgugaccgucauggcccccgacaagcccucccucgacaucagccuggagacgguggccaucgaccggccggccgaggugcgcaaggucugcuacaacgccgugcugacccacgugaagaucaacgacaagugccccuccaccggcgaggcgcaccucgccgaggagaacgagggggacaacgccugcaagcggaccuacagcgaccggggcugggggaacggcugcgggcuguucggcaagggcuccaucgucgccugcgccaaguucacgugcgcgaagagcaugucccuguucgagguggaccagaccaagauccaguacgucauccgcgcccagcuccacgugggggccaagcaggagaacuggaacaccgacaucaagacccugaaguucgacgcccugagcggcagccaggagguggaguucaucggguacggcaaggccacgcucgagugccagguccagaccgcgguggacuucgggaacuccuacaucgccgagauggagaccgagagcuggaucguggaccggcagugggcccaggaccugacccugcccuggcaguccggcagcggcggggucuggcgcgagaugcaccaccucguggaguucgagcccccgcacgccgccacgauccgggugcuggcgcugggcaaccaggaggggucccucaagaccgcccugaccggcgccaugcgcgucaccaaggacacgaacgacaacaaccuguacaagcuccacgggggccacgugagcugccgggugaagcuguccgcccugacccucaagggcaccagcuacaagaucugcaccgacaagauguucuucgucaagaaccccacggacaccgggcacggcaccguggugaugcaggucaagguguccaagggggcgcccugccgcaucccggugaucgucgccgacgaccugaccgccgccaucaacaagggcauccuggugaccgugaacccgaucgccagcacgaacgacgacgagguccucaucgaggugaacccccccuucggcgacuccuacaucaucguggggcggggcgacagccgccugaccuaccaguggcacaaggagggguccagcaucggcagcacccuggggaaggccuucuccaccacgcucaagggcgcccagcgccuggcggcccugggggacaccgccugggacuucggcagcaucgggggcguguucaacuccaucggccgggccguccaccagguguucgggggcgccuuccgcacccucuucgggggcaugagcuggaucacccaggggcugaugggcgcgcugcuccuguggaugggggugaacgcccgggaccgcuccaucgcccuggccuuccucgcgacgggcggcguccugguguuccuggccaccaacgugcacgccugaggacuagucccuguucccagagcccacuuuuuuuucuuuuuuugaaauaaaauagccugucuuucagaucuaaaaaaaaaaaaaaaaaaaaaaaaaaaaaaaaaaaaaaaaaaaaaaaaaaaaaaaaaaaaaaaaugcaucccccccccccccccccccccccccccccccaaaggcucuuuucagagccaccagaauu

SEQ ID NO: 1654 - RNA, 2344 nt, Artificial Sequence
  mRNA product Design a-2 comprising derived and/or modified sequence from YFV__NC_002031.1__SSjev(V3)-prMEdelstem_TM-JEV (polyprotein: aa122-681) (opt1)
gggagaguccgcucagccagguugcagaagcggcuuagcguguguccuaaucuucucucugcguguagguaggccugugccgcaaacaagcuuaccaugaacgagggcagcaucauguggcuggccucccucgccguggucaucgcgugcgccggggccgugacgcuggugcggaagaaccgcuggcuccugcugaacgucaccuccgaggaccucggcaagaccuucagcguggggaccggcaacugcacgaccaacauccuggaggccaaguacuggugccccgacuccauggaguacaacugcccgaaccugagcccccgggaggagcccgacgacaucgacugcuggugcuacggcguggagaacguccgcguggccuacgggaagugcgacuccgcgggccggagccgccggucccgccgggccaucgaccuccccacccacgagaaccacgggcugaagacccgccaggagaaguggaugacgggccggaugggggagcgccagcugcagaagaucgagcggugguucgugcgcaacccguucuucgccgucaccgcccucaccaucgccuaccuggugggcagcaacaugacccagcggguggucaucgcgcugcucgugcuggccgugggccccgccuacuccgcccacugcaucgggaucacggaccgcgacuucaucgagggcguccacgggggcaccugggugagcgcgacccuggagcaggacaagugcgugaccgucauggcccccgacaagcccucccucgacaucagccuggagacgguggccaucgaccggccggccgaggugcgcaaggucugcuacaacgccgugcugacccacgugaagaucaacgacaagugccccuccaccggcgaggcgcaccucgccgaggagaacgagggggacaacgccugcaagcggaccuacagcgaccggggcugggggaacggcugcgggcuguucggcaagggcuccaucgucgccugcgccaaguucacgugcgcgaagagcaugucccuguucgagguggaccagaccaagauccaguacgucauccgcgcccagcuccacgugggggccaagcaggagaacuggaacaccgacaucaagacccugaaguucgacgcccugagcggcagccaggagguggaguucaucggguacggcaaggccacgcucgagugccagguccagaccgcgguggacuucgggaacuccuacaucgccgagauggagaccgagagcuggaucguggaccggcagugggcccaggaccugacccugcccuggcaguccggcagcggcggggucuggcgcgagaugcaccaccucguggaguucgagcccccgcacgccgccacgauccgggugcuggcgcugggcaaccaggaggggucccucaagaccgcccugaccggcgccaugcgcgucaccaaggacacgaacgacaacaaccuguacaagcuccacgggggccacgugagcugccgggugaagcuguccgcccugacccucaagggcaccagcuacaagaucugcaccgacaagauguucuucgucaagaaccccacggacaccgggcacggcaccguggugaugcaggucaagguguccaagggggcgcccugccgcaucccggugaucgucgccgacgaccugaccgccgccaucaacaagggcauccuggugaccgugaacccgaucgccagcacgaacgacgacgagguccucaucgaggugaacccccccuucggcgacuccuacaucaucguggggcggggcgacagccgccugaccuaccaguggcacaaggagggguccagcaucggcagcacccuggggaaggccuucuccaccacgcucaagggcgcccagcgccuggcggcccugggggacaccgccugggacuucggcagcaucgggggcguguucaacuccaucggccgggccguccaccagguguucgggggcgccuuccgcacccucuucgggggcaugagcuggaucacccaggggcugaugggcgcgcugcuccuguggaugggggugaacgcccgggaccgcuccaucgcccuggccuuccucgcgacgggcggcguccugguguuccuggccaccaacgugcacgccugaggacuagucccuguucccagagcccacuuuuuuuucuuuuuuugaaauaaaauagccugucuuucagaucuaaaaaaaaaaaaaaaaaaaaaaaaaaaaaaaaaaaaaaaaaaaaaaaaaaaaaaaaaaaaaaaaugcaucccccccccccccccccccccccccccccccaaaggcucuuuucagagccaccagaauu

SEQ ID NO: 1655 - RNA, 2359 nt, Artificial Sequence
  mRNA product Design a-2 comprising derived and/or modified sequence from YFV__NC_002031.1__X-SS-prME (polyprotein: aa92-778) (opt1)
gggagaguccgcucagccagguugcagaagcggcuuagcguguguccuaaucuucucucugcguguagguaggccugugccgcaaacaagcuuaccaugcggggccugagcucccgcaagcggcgcagccacgacgugcucaccguccaguuccugauccuggggaugcuccugaugaccggcggggugacgcuggugcggaagaaccgcuggcuccugcugaacgucaccuccgaggaccucggcaagaccuucagcguggggaccggcaacugcacgaccaacauccuggaggccaaguacuggugccccgacuccauggaguacaacugcccgaaccugagcccccgggaggagcccgacgacaucgacugcuggugcuacggcguggagaacguccgcguggccuacgggaagugcgacuccgcgggccggagccgccggucccgccgggccaucgaccuccccacccacgagaaccacgggcugaagacccgccaggagaaguggaugacgggccggaugggggagcgccagcugcagaagaucgagcggugguucgugcgcaacccguucuucgccgucaccgcccucaccaucgccuaccuggugggcagcaacaugacccagcggguggucaucgcgcugcucgugcuggccgugggccccgccuacuccgcccacugcaucgggaucacggaccgcgacuucaucgagggcguccacgggggcaccugggugagcgcgacccuggagcaggacaagugcgugaccgucauggcccccgacaagcccucccucgacaucagccuggagacgguggccaucgaccggccggccgaggugcgcaaggucugcuacaacgccgugcugacccacgugaagaucaacgacaagugccccuccaccggcgaggcgcaccucgccgaggagaacgagggggacaacgccugcaagcggaccuacagcgaccggggcugggggaacggcugcgggcuguucggcaagggcuccaucgucgccugcgccaaguucacgugcgcgaagagcaugucccuguucgagguggaccagaccaagauccaguacgucauccgcgcccagcuccacgugggggccaagcaggagaacuggaacaccgacaucaagacccugaaguucgacgcccugagcggcagccaggagguggaguucaucggguacggcaaggccacgcucgagugccagguccagaccgcgguggacuucgggaacuccuacaucgccgagauggagaccgagagcuggaucguggaccggcagugggcccaggaccugacccugcccuggcaguccggcagcggcggggucuggcgcgagaugcaccaccucguggaguucgagcccccgcacgccgccacgauccgggugcuggcgcugggcaaccaggaggggucccucaagaccgcccugaccggcgccaugcgcgucaccaaggacacgaacgacaacaaccuguacaagcuccacgggggccacgugagcugccgggugaagcuguccgcccugacccucaagggcaccagcuacaagaucugcaccgacaagauguucuucgucaagaaccccacggacaccgggcacggcaccguggugaugcaggucaagguguccaagggggcgcccugccgcaucccggugaucgucgccgacgaccugaccgccgccaucaacaagggcauccuggugaccgugaacccgaucgccagcacgaacgacgacgagguccucaucgaggugaacccccccuucggcgacuccuacaucaucguggggcggggcgacagccgccugaccuaccaguggcacaaggagggguccagcaucggcaagcuguucacccagaccaugaagggggucgagcggcuggcggugaugggcgacacggccugggacuucuccagcgccggcggguucuucaccuccgugggcaaggggauccacaccgucuucggcagcgccuuccaggggcucuucggcggccugaacuggaucaccaaggugaucaugggggccgugcugaucugggucggcaucaacacgcgcaacaugaccauguccaugagcaugauccucgugggggugaucaugauguuccugagccugggcgucggggcgugaggacuagucccuguucccagagcccacuuuuuuuucuuuuuuugaaauaaaauagccugucuuucagaucuaaaaaaaaaaaaaaaaaaaaaaaaaaaaaaaaaaaaaaaaaaaaaaaaaaaaaaaaaaaaaaaaugcaucccccccccccccccccccccccccccccccaaaggcucuuuucagagccaccagaauu

SEQ ID NO: 1656 - RNA, 2362 nt, Artificial Sequence
  mRNA product Design a-2 comprising derived and/or modified sequence from YFV__NC_002031.1__SSjev(V3)-prME-XX (polyprotein: aa122-788) (opt1)
gggagaguccgcucagccagguugcagaagcggcuuagcguguguccuaaucuucucucugcguguagguaggccugugccgcaaacaagcuuaccaugaacgagggcagcaucauguggcuggccucccucgccguggucaucgcgugcgccggggccgugacgcuggugcggaagaaccgcuggcuccugcugaacgucaccuccgaggaccucggcaagaccuucagcguggggaccggcaacugcacgaccaacauccuggaggccaaguacuggugccccgacuccauggaguacaacugcccgaaccugagcccccgggaggagcccgacgacaucgacugcuggugcuacggcguggagaacguccgcguggccuacgggaagugcgacuccgcgggccggagccgccggucccgccgggccaucgaccuccccacccacgagaaccacgggcugaagacccgccaggagaaguggaugacgggccggaugggggagcgccagcugcagaagaucgagcggugguucgugcgcaacccguucuucgccgucaccgcccucaccaucgccuaccuggugggcagcaacaugacccagcggguggucaucgcgcugcucgugcuggccgugggccccgccuacuccgcccacugcaucgggaucacggaccgcgacuucaucgagggcguccacgggggcaccugggugagcgcgacccuggagcaggacaagugcgugaccgucauggcccccgacaagcccucccucgacaucagccuggagacgguggccaucgaccggccggccgaggugcgcaaggucugcuacaacgccgugcugacccacgugaagaucaacgacaagugccccuccaccggcgaggcgcaccucgccgaggagaacgagggggacaacgccugcaagcggaccuacagcgaccggggcugggggaacggcugcgggcuguucggcaagggcuccaucgucgccugcgccaaguucacgugcgcgaagagcaugucccuguucgagguggaccagaccaagauccaguacgucauccgcgcccagcuccacgugggggccaagcaggagaacuggaacaccgacaucaagacccugaaguucgacgcccugagcggcagccaggagguggaguucaucggguacggcaaggccacgcucgagugccagguccagaccgcgguggacuucgggaacuccuacaucgccgagauggagaccgagagcuggaucguggaccggcagugggcccaggaccugacccugcccuggcaguccggcagcggcggggucuggcgcgagaugcaccaccucguggaguucgagcccccgcacgccgccacgauccgggugcuggcgcugggcaaccaggaggggucccucaagaccgcccugaccggcgccaugcgcgucaccaaggacacgaacgacaacaaccuguacaagcuccacgggggccacgugagcugccgggugaagcuguccgcccugacccucaagggcaccagcuacaagaucugcaccgacaagauguucuucgucaagaaccccacggacaccgggcacggcaccguggugaugcaggucaagguguccaagggggcgcccugccgcaucccggugaucgucgccgacgaccugaccgccgccaucaacaagggcauccuggugaccgugaacccgaucgccagcacgaacgacgacgagguccucaucgaggugaacccccccuucggcgacuccuacaucaucguggggcggggcgacagccgccugaccuaccaguggcacaaggagggguccagcaucggcaagcuguucacccagaccaugaagggggucgagcggcuggcggugaugggcgacacggccugggacuucuccagcgccggcggguucuucaccuccgugggcaaggggauccacaccgucuucggcagcgccuuccaggggcucuucggcggccugaacuggaucaccaaggugaucaugggggccgugcugaucugggucggcaucaacacgcgcaacaugaccauguccaugagcaugauccucgugggggugaucaugauguuccugagccugggcgucggggcggaccagggcugcgccaucaacuucggcaagugaggacuagucccuguucccagagcccacuuuuuuuucuuuuuuugaaauaaaauagccugucuuucagaucuaaaaaaaaaaaaaaaaaaaaaaaaaaaaaaaaaaaaaaaaaaaaaaaaaaaaaaaaaaaaaaaaugcaucccccccccccccccccccccccccccccccaaaggcucuuuucagagccaccagaauu

SEQ ID NO: 1657 - RNA, 2371 nt, Artificial Sequence
  mRNA product Design a-2 comprising derived and/or modified sequence from YFV__NC_002031.1__X-SS-prMEdelstem_TM-JEV (polyprotein: aa92-681) (opt1)
gggagaguccgcucagccagguugcagaagcggcuuagcguguguccuaaucuucucucugcguguagguaggccugugccgcaaacaagcuuaccaugcggggccugagcucccgcaagcggcgcagccacgacgugcucaccguccaguuccugauccuggggaugcuccugaugaccggcggggugacgcuggugcggaagaaccgcuggcuccugcugaacgucaccuccgaggaccucggcaagaccuucagcguggggaccggcaacugcacgaccaacauccuggaggccaaguacuggugccccgacuccauggaguacaacugcccgaaccugagcccccgggaggagcccgacgacaucgacugcuggugcuacggcguggagaacguccgcguggccuacgggaagugcgacuccgcgggccggagccgccggucccgccgggccaucgaccuccccacccacgagaaccacgggcugaagacccgccaggagaaguggaugacgggccggaugggggagcgccagcugcagaagaucgagcggugguucgugcgcaacccguucuucgccgucaccgcccucaccaucgccuaccuggugggcagcaacaugacccagcggguggucaucgcgcugcucgugcuggccgugggccccgccuacuccgcccacugcaucgggaucacggaccgcgacuucaucgagggcguccacgggggcaccugggugagcgcgacccuggagcaggacaagugcgugaccgucauggcccccgacaagcccucccucgacaucagccuggagacgguggccaucgaccggccggccgaggugcgcaaggucugcuacaacgccgugcugacccacgugaagaucaacgacaagugccccuccaccggcgaggcgcaccucgccgaggagaacgagggggacaacgccugcaagcggaccuacagcgaccggggcugggggaacggcugcgggcuguucggcaagggcuccaucgucgccugcgccaaguucacgugcgcgaaguccaugagccuguucgagguggaccagaccaagauccaguacgucauccgcgcccagcuccacgugggggccaagcaggagaacuggaacaccgacaucaagacccugaaguucgacgcccugagcggcagccaggagguggaguucaucggguacggcaaggccacgcucgagugccagguccagaccgcgguggacuucgggaacuccuacaucgccgagauggagaccgagagcuggaucguggaccggcagugggcccaggaccugacccugcccuggcaguccggcagcggcggggucuggcgcgagaugcaccaccucguggaguucgagcccccgcacgccgccacgauccgggugcuggcgcugggcaaccaggaggggucccucaagaccgcccugaccggcgccaugcgcgucaccaaggacacgaacgacaacaaccuguacaagcuccacgggggccacgugagcugccgggugaagcuguccgcccugacccucaagggcaccagcuacaagaucugcaccgacaagauguucuucgucaagaaccccacggacaccgggcacggcaccguggugaugcaggucaagguguccaagggggcgcccugccgcaucccggugaucgucgccgacgaccugaccgccgccaucaacaagggcauccuggugaccgugaacccgaucgccagcacgaacgacgacgagguccucaucgaggugaacccccccuucggcgacuccuacaucaucguggggcggggcgacagccgccugaccuaccaguggcacaaggagggguccagcaucggcagcacccuggggaaggccuucuccaccacgcucaagggcgcccagcgccuggcggcccugggggacaccgccugggacuucggcagcaucgggggcguguucaacuccaucggccgggccguccaccagguguucgggggcgccuuccgcacccucuucgggggcaugagcuggaucacccaggggcugaugggcgcgcugcuccuguggaugggggugaacgcccgggaccgcuccaucgcccuggccuuccucgcgacgggcggcguccugguguuccuggccaccaacgugcacgccugaggacuagucccuguucccagagcccacuuuuuuuucuuuuuuugaaauaaaauagccugucuuucagaucuaaaaaaaaaaaaaaaaaaaaaaaaaaaaaaaaaaaaaaaaaaaaaaaaaaaaaaaaaaaaaaaaugcaucccccccccccccccccccccccccccccccaaaggcucuuuucagagccaccagaauu

SEQ ID NO: 1658 - RNA, 2344 nt, Artificial Sequence
  mRNA product Design a-2 comprising derived and/or modified sequence from YFV__NC_002031.1__SSjev(V3)-prMEdelstem_TM-JEV (polyprotein: aa122-681) (opt1)
gggagaguccgcucagccagguugcagaagcggcuuagcguguguccuaaucuucucucugcguguagguaggccugugccgcaaacaagcuuaccaugaacgagggcagcaucauguggcuggccucccucgccguggucaucgcgugcgccggggccgugacgcuggugcggaagaaccgcuggcuccugcugaacgucaccuccgaggaccucggcaagaccuucagcguggggaccggcaacugcacgaccaacauccuggaggccaaguacuggugccccgacuccauggaguacaacugcccgaaccugagcccccgggaggagcccgacgacaucgacugcuggugcuacggcguggagaacguccgcguggccuacgggaagugcgacuccgcgggccggagccgccggucccgccgggccaucgaccuccccacccacgagaaccacgggcugaagacccgccaggagaaguggaugacgggccggaugggggagcgccagcugcagaagaucgagcggugguucgugcgcaacccguucuucgccgucaccgcccucaccaucgccuaccuggugggcagcaacaugacccagcggguggucaucgcgcugcucgugcuggccgugggccccgccuacuccgcccacugcaucgggaucacggaccgcgacuucaucgagggcguccacgggggcaccugggugagcgcgacccuggagcaggacaagugcgugaccgucauggcccccgacaagcccucccucgacaucagccuggagacgguggccaucgaccggccggccgaggugcgcaaggucugcuacaacgccgugcugacccacgugaagaucaacgacaagugccccuccaccggcgaggcgcaccucgccgaggagaacgagggggacaacgccugcaagcggaccuacagcgaccggggcugggggaacggcugcgggcuguucggcaagggcuccaucgucgccugcgccaaguucacgugcgcgaaguccaugagccuguucgagguggaccagaccaagauccaguacgucauccgcgcccagcuccacgugggggccaagcaggagaacuggaacaccgacaucaagacccugaaguucgacgcccugagcggcagccaggagguggaguucaucggguacggcaaggccacgcucgagugccagguccagaccgcgguggacuucgggaacuccuacaucgccgagauggagaccgagagcuggaucguggaccggcagugggcccaggaccugacccugcccuggcaguccggcagcggcggggucuggcgcgagaugcaccaccucguggaguucgagcccccgcacgccgccacgauccgggugcuggcgcugggcaaccaggaggggucccucaagaccgcccugaccggcgccaugcgcgucaccaaggacacgaacgacaacaaccuguacaagcuccacgggggccacgugagcugccgggugaagcuguccgcccugacccucaagggcaccagcuacaagaucugcaccgacaagauguucuucgucaagaaccccacggacaccgggcacggcaccguggugaugcaggucaagguguccaagggggcgcccugccgcaucccggugaucgucgccgacgaccugaccgccgccaucaacaagggcauccuggugaccgugaacccgaucgccagcacgaacgacgacgagguccucaucgaggugaacccccccuucggcgacuccuacaucaucguggggcggggcgacagccgccugaccuaccaguggcacaaggagggguccagcaucggcagcacccuggggaaggccuucuccaccacgcucaagggcgcccagcgccuggcggcccugggggacaccgccugggacuucggcagcaucgggggcguguucaacuccaucggccgggccguccaccagguguucgggggcgccuuccgcacccucuucgggggcaugagcuggaucacccaggggcugaugggcgcgcugcuccuguggaugggggugaacgcccgggaccgcuccaucgcccuggccuuccucgcgacgggcggcguccugguguuccuggccaccaacgugcacgccugaggacuagucccuguucccagagcccacuuuuuuuucuuuuuuugaaauaaaauagccugucuuucagaucuaaaaaaaaaaaaaaaaaaaaaaaaaaaaaaaaaaaaaaaaaaaaaaaaaaaaaaaaaaaaaaaaugcaucccccccccccccccccccccccccccccccaaaggcucuuuucagagccaccagaauu

SEQ ID NO: 1659 - RNA, 2359 nt, Artificial Sequence
  mRNA product Design a-2 comprising derived and/or modified sequence from YFV__NC_002031.1__X-SS-prME (polyprotein: aa92-778) (opt1)
gggagaguccgcucagccagguugcagaagcggcuuagcguguguccuaaucuucucucugcguguagguaggccugugccgcaaacaagcuuaccaugcggggccugagcucccgcaagcggcgcagccacgacgugcucaccguccaguuccugauccuggggaugcuccugaugaccggcggggugacgcuggugcggaagaaccgcuggcuccugcugaacgucaccuccgaggaccucggcaagaccuucagcguggggaccggcaacugcacgaccaacauccuggaggccaaguacuggugccccgacuccauggaguacaacugcccgaaccugagcccccgggaggagcccgacgacaucgacugcuggugcuacggcguggagaacguccgcguggccuacgggaagugcgacuccgcgggccggagccgccggucccgccgggccaucgaccuccccacccacgagaaccacgggcugaagacccgccaggagaaguggaugacgggccggaugggggagcgccagcugcagaagaucgagcggugguucgugcgcaacccguucuucgccgucaccgcccucaccaucgccuaccuggugggcagcaacaugacccagcggguggucaucgcgcugcucgugcuggccgugggccccgccuacuccgcccacugcaucgggaucacggaccgcgacuucaucgagggcguccacgggggcaccugggugagcgcgacccuggagcaggacaagugcgugaccgucauggcccccgacaagcccucccucgacaucagccuggagacgguggccaucgaccggccggccgaggugcgcaaggucugcuacaacgccgugcugacccacgugaagaucaacgacaagugccccuccaccggcgaggcgcaccucgccgaggagaacgagggggacaacgccugcaagcggaccuacagcgaccggggcugggggaacggcugcgggcuguucggcaagggcuccaucgucgccugcgccaaguucacgugcgcgaaguccaugagccuguucgagguggaccagaccaagauccaguacgucauccgcgcccagcuccacgugggggccaagcaggagaacuggaacaccgacaucaagacccugaaguucgacgcccugagcggcagccaggagguggaguucaucggguacggcaaggccacgcucgagugccagguccagaccgcgguggacuucgggaacuccuacaucgccgagauggagaccgagagcuggaucguggaccggcagugggcccaggaccugacccugcccuggcaguccggcagcggcggggucuggcgcgagaugcaccaccucguggaguucgagcccccgcacgccgccacgauccgggugcuggcgcugggcaaccaggaggggucccucaagaccgcccugaccggcgccaugcgcgucaccaaggacacgaacgacaacaaccuguacaagcuccacgggggccacgugagcugccgggugaagcuguccgcccugacccucaagggcaccagcuacaagaucugcaccgacaagauguucuucgucaagaaccccacggacaccgggcacggcaccguggugaugcaggucaagguguccaagggggcgcccugccgcaucccggugaucgucgccgacgaccugaccgccgccaucaacaagggcauccuggugaccgugaacccgaucgccagcacgaacgacgacgagguccucaucgaggugaacccccccuucggcgacuccuacaucaucguggggcggggcgacagccgccugaccuaccaguggcacaaggagggguccagcaucggcaagcuguucacccagaccaugaagggggucgagcggcuggcggugaugggcgacacggccugggacuucuccagcgccggcggguucuucaccuccgugggcaaggggauccacaccgucuucggcagcgccuuccaggggcuguucggcggccucaacuggaucaccaaggugaucaugggggccgugcugaucugggucggcaucaacacgcgcaacaugaccauguccaugagcaugauccucgugggggugaucaugauguuccugagccugggcgucggggcgugaggacuagucccuguucccagagcccacuuuuuuuucuuuuuuugaaauaaaauagccugucuuucagaucuaaaaaaaaaaaaaaaaaaaaaaaaaaaaaaaaaaaaaaaaaaaaaaaaaaaaaaaaaaaaaaaaugcaucccccccccccccccccccccccccccccccaaaggcucuuuucagagccaccagaauu

SEQ ID NO: 1660 - RNA, 2362 nt, Artificial Sequence
  mRNA product Design a-2 comprising derived and/or modified sequence from YFV__NC_002031.1__SSjev(V3)-prME-XX (polyprotein: aa122-788) (opt1)
gggagaguccgcucagccagguugcagaagcggcuuagcguguguccuaaucuucucucugcguguagguaggccugugccgcaaacaagcuuaccaugaacgagggcagcaucauguggcuggccucccucgccguggucaucgcgugcgccggggccgugacgcuggugcggaagaaccgcuggcuccugcugaacgucaccuccgaggaccucggcaagaccuucagcguggggaccggcaacugcacgaccaacauccuggaggccaaguacuggugccccgacuccauggaguacaacugcccgaaccugagcccccgggaggagcccgacgacaucgacugcuggugcuacggcguggagaacguccgcguggccuacgggaagugcgacuccgcgggccggagccgccggucccgccgggccaucgaccuccccacccacgagaaccacgggcugaagacccgccaggagaaguggaugacgggccggaugggggagcgccagcugcagaagaucgagcggugguucgugcgcaacccguucuucgccgucaccgcccucaccaucgccuaccuggugggcagcaacaugacccagcggguggucaucgcgcugcucgugcuggccgugggccccgccuacuccgcccacugcaucgggaucacggaccgcgacuucaucgagggcguccacgggggcaccugggugagcgcgacccuggagcaggacaagugcgugaccgucauggcccccgacaagcccucccucgacaucagccuggagacgguggccaucgaccggccggccgaggugcgcaaggucugcuacaacgccgugcugacccacgugaagaucaacgacaagugccccuccaccggcgaggcgcaccucgccgaggagaacgagggggacaacgccugcaagcggaccuacagcgaccggggcugggggaacggcugcgggcuguucggcaagggcuccaucgucgccugcgccaaguucacgugcgcgaaguccaugagccuguucgagguggaccagaccaagauccaguacgucauccgcgcccagcuccacgugggggccaagcaggagaacuggaacaccgacaucaagacccugaaguucgacgcccugagcggcagccaggagguggaguucaucggguacggcaaggccacgcucgagugccagguccagaccgcgguggacuucgggaacuccuacaucgccgagauggagaccgagagcuggaucguggaccggcagugggcccaggaccugacccugcccuggcaguccggcagcggcggggucuggcgcgagaugcaccaccucguggaguucgagcccccgcacgccgccacgauccgggugcuggcgcugggcaaccaggaggggucccucaagaccgcccugaccggcgccaugcgcgucaccaaggacacgaacgacaacaaccuguacaagcuccacgggggccacgugagcugccgggugaagcuguccgcccugacccucaagggcaccagcuacaagaucugcaccgacaagauguucuucgucaagaaccccacggacaccgggcacggcaccguggugaugcaggucaagguguccaagggggcgcccugccgcaucccggugaucgucgccgacgaccugaccgccgccaucaacaagggcauccuggugaccgugaacccgaucgccagcacgaacgacgacgagguccucaucgaggugaacccccccuucggcgacuccuacaucaucguggggcggggcgacagccgccugaccuaccaguggcacaaggagggguccagcaucggcaagcuguucacccagaccaugaagggggucgagcggcuggcggugaugggcgacacggccugggacuucuccagcgccggcggguucuucaccuccgugggcaaggggauccacaccgucuucggcagcgccuuccaggggcuguucggcggccucaacuggaucaccaaggugaucaugggggccgugcugaucugggucggcaucaacacgcgcaacaugaccauguccaugagcaugauccucgugggggugaucaugauguuccugagccugggcgucggggcggaccagggcugcgccaucaacuucggcaagugaggacuagucccuguucccagagcccacuuuuuuuucuuuuuuugaaauaaaauagccugucuuucagaucuaaaaaaaaaaaaaaaaaaaaaaaaaaaaaaaaaaaaaaaaaaaaaaaaaaaaaaaaaaaaaaaaugcaucccccccccccccccccccccccccccccccaaaggcucuuuucagagccaccagaauu

SEQ ID NO: 1661 - RNA, 2371 nt, Artificial Sequence
  mRNA product Design a-2 comprising derived and/or modified sequence from YFV__NC_002031.1__X-SS-prMEdelstem_TM-JEV (polyprotein: aa92-681) (opt1)
gggagaguccgcucagccagguugcagaagcggcuuagcguguguccuaaucuucucucugcguguagguaggccugugccgcaaacaagcuuaccaugcggggccugagcucccgcaagcggcgcagccacgacgugcucaccguccaguuccugauccuggggaugcuccugaugaccggcggggugacgcuggugcggaagaaccgcuggcuccugcugaacgucaccuccgaggaccucggcaagaccuucagcguggggaccggcaacugcacgaccaacauccuggaggccaaguacuggugccccgacuccauggaguacaacugccccaaccugagcccccgggaggagcccgacgacaucgacugcuggugcuacggcguggagaacguccgcguggccuacgggaagugcgacuccgcgggccggagccgccggucccgccgggccaucgaccuccccacccacgagaaccacgggcugaagacccgccaggagaaguggaugacgggccggaugggggagcgccagcugcagaagaucgagcggugguucgugcgcaacccguucuucgccgucaccgcccucaccaucgccuaccuggugggcagcaacaugacccagcggguggucaucgcgcugcucgugcuggccgugggccccgccuacuccgcccacugcaucgggaucacggaccgcgacuucaucgagggcguccacgggggcaccugggugagcgcgacccuggagcaggacaagugcgugaccgucauggcccccgacaagcccucccucgacaucagccuggagacgguggccaucgaccggccggccgaggugcgcaaggucugcuacaacgccgugcugacccacgugaagaucaacgacaagugccccuccaccggcgaggcgcaccucgccgaggagaacgagggggacaacgccugcaagcggaccuacagcgaccggggcugggggaacggcugcgggcuguucggcaagggcuccaucgucgccugcgccaaguucacgugcgcgaaguccaugagccuguucgagguggaccagaccaagauccaguacgucauccgcgcccagcuccacgugggggccaagcaggagaacuggaacaccgacaucaagacccugaaguucgacgcccugagcggcagccaggagguggaguucaucggguacggcaaggccacgcucgagugccagguccagaccgcgguggacuucgggaacuccuacaucgccgagauggagaccgagagcuggaucguggaccggcagugggcccaggaccugacccugcccuggcaguccggcagcggcggggucuggcgcgagaugcaccaccucguggaguucgagcccccgcacgccgccacgauccgggugcuggcgcugggcaaccaggaggggucccucaagaccgcccugaccggcgccaugcgcgucaccaaggacacgaacgacaacaaccuguacaagcuccacgggggccacgugagcugccgggugaagcuguccgcccugacccucaagggcaccagcuacaagaucugcaccgacaagauguucuucgucaagaaccccacggacaccgggcacggcaccguggugaugcaggucaagguguccaagggggcgcccugccgcaucccggugaucgucgccgacgaccugaccgccgccaucaacaagggcauccuggugaccgugaacccgaucgccagcacgaacgacgacgagguccucaucgaggugaacccgcccuucggcgacuccuacaucaucguggggcggggcgacagccgccugaccuaccaguggcacaaggagggguccagcaucggaagcacgcugggcaaggccuuuucaacaacuuugaagggagcucaaagacuggcagcguugggcgacacagccugggacuuuggcucuauuggaggggucuucaacuccauagguagagccguucaccaaguguuuggaggugccuucagaacacucuuugggggaaugucuuggaucacacaagggcuaaugggugcccuacugcucuggaugggcgucaacgcacgagaccgaucaauugcuuuggccuucuuagccacaggaggugugcucguguucuuagcgaccaaugugcacgccugaggacuagucccuguucccagagcccacuuuuuuuucuuuuuuugaaauaaaauagccugucuuucagaucuaaaaaaaaaaaaaaaaaaaaaaaaaaaaaaaaaaaaaaaaaaaaaaaaaaaaaaaaaaaaaaaaugcaucccccccccccccccccccccccccccccccaaaggcucuuuucagagccaccagaauu

SEQ ID NO: 1662 - RNA, 2344 nt, Artificial Sequence
  mRNA product Design a-2 comprising derived and/or modified sequence from YFV__NC_002031.1__SSjev(V3)-prMEdelstem_TM-JEV (polyprotein: aa122-681) (opt1)
gggagaguccgcucagccagguugcagaagcggcuuagcguguguccuaaucuucucucugcguguagguaggccugugccgcaaacaagcuuaccaugaacgagggcagcaucauguggcuggccucccucgccguggucaucgcgugcgccggggccgugacgcuggugcggaagaaccgcuggcuccugcugaacgucaccuccgaggaccucggcaagaccuucagcguggggaccggcaacugcacgaccaacauccuggaggccaaguacuggugccccgacuccauggaguacaacugccccaaccugagcccccgggaggagcccgacgacaucgacugcuggugcuacggcguggagaacguccgcguggccuacgggaagugcgacuccgcgggccggagccgccggucccgccgggccaucgaccuccccacccacgagaaccacgggcugaagacccgccaggagaaguggaugacgggccggaugggggagcgccagcugcagaagaucgagcggugguucgugcgcaacccguucuucgccgucaccgcccucaccaucgccuaccuggugggcagcaacaugacccagcggguggucaucgcgcugcucgugcuggccgugggccccgccuacuccgcccacugcaucgggaucacggaccgcgacuucaucgagggcguccacgggggcaccugggugagcgcgacccuggagcaggacaagugcgugaccgucauggcccccgacaagcccucccucgacaucagccuggagacgguggccaucgaccggccggccgaggugcgcaaggucugcuacaacgccgugcugacccacgugaagaucaacgacaagugccccuccaccggcgaggcgcaccucgccgaggagaacgagggggacaacgccugcaagcggaccuacagcgaccggggcugggggaacggcugcgggcuguucggcaagggcuccaucgucgccugcgccaaguucacgugcgcgaaguccaugagccuguucgagguggaccagaccaagauccaguacgucauccgcgcccagcuccacgugggggccaagcaggagaacuggaacaccgacaucaagacccugaaguucgacgcccugagcggcagccaggagguggaguucaucggguacggcaaggccacgcucgagugccagguccagaccgcgguggacuucgggaacuccuacaucgccgagauggagaccgagagcuggaucguggaccggcagugggcccaggaccugacccugcccuggcaguccggcagcggcggggucuggcgcgagaugcaccaccucguggaguucgagcccccgcacgccgccacgauccgggugcuggcgcugggcaaccaggaggggucccucaagaccgcccugaccggcgccaugcgcgucaccaaggacacgaacgacaacaaccuguacaagcuccacgggggccacgugagcugccgggugaagcuguccgcccugacccucaagggcaccagcuacaagaucugcaccgacaagauguucuucgucaagaaccccacggacaccgggcacggcaccguggugaugcaggucaagguguccaagggggcgcccugccgcaucccggugaucgucgccgacgaccugaccgccgccaucaacaagggcauccuggugaccgugaacccgaucgccagcacgaacgacgacgagguccucaucgaggugaacccgcccuucggcgacuccuacaucaucguggggcggggcgacagccgccugaccuaccaguggcacaaggagggguccagcaucggcagcacccuggggaaggccuucuccaccacgcucaagggcgcccagcgccuggcggcccugggggacaccgccugggacuucggcagcaucgggggcguguucaacuccaucggccgggccguccaccagguguucgggggcgccuuccgcacccucuucgggggcaugagcuggaucacccaggggcugaugggcgcgcugcuccuguggaugggggugaacgcccgggaccgcuccaucgcccuggccuuccucgcgacgggcggcguccugguguuccuggccaccaacgugcacgccugaggacuagucccuguucccagagcccacuuuuuuuucuuuuuuugaaauaaaauagccugucuuucagaucuaaaaaaaaaaaaaaaaaaaaaaaaaaaaaaaaaaaaaaaaaaaaaaaaaaaaaaaaaaaaaaaaugcaucccccccccccccccccccccccccccccccaaaggcucuuuucagagccaccagaauu

SEQ ID NO: 1663 - RNA, 2359 nt, Artificial Sequence
  mRNA product Design a-2 comprising derived and/or modified sequence from YFV__NC_002031.1__X-SS-prME (polyprotein: aa92-778) (opt1)
gggagaguccgcucagccagguugcagaagcggcuuagcguguguccuaaucuucucucugcguguagguaggccugugccgcaaacaagcuuaccaugcggggccugagcucccgcaagcggcgcagccacgacgugcucaccguccaguuccugauccuggggaugcuccugaugaccggcggggugacgcuggugcggaagaaccgcuggcuccugcugaacgucaccuccgaggaccucggcaagaccuucagcguggggaccggcaacugcacgaccaacauccuggaggccaaguacuggugccccgacuccauggaguacaacugccccaaccugagcccccgggaggagcccgacgacaucgacugcuggugcuacggcguggagaacguccgcguggccuacgggaagugcgacuccgcgggccggagccgccggucccgccgggccaucgaccuccccacccacgagaaccacgggcugaagacccgccaggagaaguggaugacgggccggaugggggagcgccagcugcagaagaucgagcggugguucgugcgcaacccguucuucgccgucaccgcccucaccaucgccuaccuggugggcagcaacaugacccagcggguggucaucgcgcugcucgugcuggccgugggccccgccuacuccgcccacugcaucgggaucacggaccgcgacuucaucgagggcguccacgggggcaccugggugagcgcgacccuggagcaggacaagugcgugaccgucauggcccccgacaagcccucccucgacaucagccuggagacgguggccaucgaccggccggccgaggugcgcaaggucugcuacaacgccgugcugacccacgugaagaucaacgacaagugccccuccaccggcgaggcgcaccucgccgaggagaacgagggggacaacgccugcaagcggaccuacagcgaccggggcugggggaacggcugcgggcuguucggcaagggcuccaucgucgccugcgccaaguucacgugcgcgaaguccaugagccuguucgagguggaccagaccaagauccaguacgucauccgcgcccagcuccacgugggggccaagcaggagaacuggaacaccgacaucaagacccugaaguucgacgcccugagcggcagccaggagguggaguucaucggguacggcaaggccacgcucgagugccagguccagaccgcgguggacuucgggaacuccuacaucgccgagauggagaccgagagcuggaucguggaccggcagugggcccaggaccugacccugcccuggcaguccggcagcggcggggucuggcgcgagaugcaccaccucguggaguucgagcccccgcacgccgccacgauccgggugcuggcgcugggcaaccaggaggggucccucaagaccgcccugaccggcgccaugcgcgucaccaaggacacgaacgacaacaaccuguacaagcuccacgggggccacgugagcugccgggugaagcuguccgcccugacccucaagggcaccagcuacaagaucugcaccgacaagauguucuucgucaagaaccccacggacaccgggcacggcaccguggugaugcaggucaagguguccaagggggcgcccugccgcaucccggugaucgucgccgacgaccugaccgccgccaucaacaagggcauccuggugaccgugaacccgaucgccagcacgaacgacgacgagguccucaucgaggugaacccgcccuucggcgacuccuacaucaucguggggcggggcgacagccgccugaccuaccaguggcacaaggagggguccagcaucggcaagcuguucacccagaccaugaagggggucgagcggcuggcggugaugggcgacacggccugggacuucuccagcgccggcggguucuucaccuccgugggcaaggggauccacaccgucuucggcagcgccuuccaggggcuguucggcggccucaacuggaucaccaaggugaucaugggggccgugcugaucugggucggcaucaacacgcgcaacaugaccauguccaugagcaugauccucgugggggugaucaugauguuccugagccugggcgucggggcgugaggacuagucccuguucccagagcccacuuuuuuuucuuuuuuugaaauaaaauagccugucuuucagaucuaaaaaaaaaaaaaaaaaaaaaaaaaaaaaaaaaaaaaaaaaaaaaaaaaaaaaaaaaaaaaaaaugcaucccccccccccccccccccccccccccccccaaaggcucuuuucagagccaccagaauu

SEQ ID NO: 1664 - RNA, 2362 nt, Artificial Sequence
  mRNA product Design a-2 comprising derived and/or modified sequence from YFV__NC_002031.1__SSjev(V3)-prME-XX (polyprotein: aa122-788) (opt1)
gggagaguccgcucagccagguugcagaagcggcuuagcguguguccuaaucuucucucugcguguagguaggccugugccgcaaacaagcuuaccaugaacgagggcagcaucauguggcuggccucccucgccguggucaucgcgugcgccggggccgugacgcuggugcggaagaaccgcuggcuccugcugaacgucaccuccgaggaccucggcaagaccuucagcguggggaccggcaacugcacgaccaacauccuggaggccaaguacuggugccccgacuccauggaguacaacugccccaaccugagcccccgggaggagcccgacgacaucgacugcuggugcuacggcguggagaacguccgcguggccuacgggaagugcgacuccgcgggccggagccgccggucccgccgggccaucgaccuccccacccacgagaaccacgggcugaagacccgccaggagaaguggaugacgggccggaugggggagcgccagcugcagaagaucgagcggugguucgugcgcaacccguucuucgccgucaccgcccucaccaucgccuaccuggugggcagcaacaugacccagcggguggucaucgcgcugcucgugcuggccgugggccccgccuacuccgcccacugcaucgggaucacggaccgcgacuucaucgagggcguccacgggggcaccugggugagcgcgacccuggagcaggacaagugcgugaccgucauggcccccgacaagcccucccucgacaucagccuggagacgguggccaucgaccggccggccgaggugcgcaaggucugcuacaacgccgugcugacccacgugaagaucaacgacaagugccccuccaccggcgaggcgcaccucgccgaggagaacgagggggacaacgccugcaagcggaccuacagcgaccggggcugggggaacggcugcgggcuguucggcaagggcuccaucgucgccugcgccaaguucacgugcgcgaaguccaugagccuguucgagguggaccagaccaagauccaguacgucauccgcgcccagcuccacgugggggccaagcaggagaacuggaacaccgacaucaagacccugaaguucgacgcccugagcggcagccaggagguggaguucaucggguacggcaaggccacgcucgagugccagguccagaccgcgguggacuucgggaacuccuacaucgccgagauggagaccgagagcuggaucguggaccggcagugggcccaggaccugacccugcccuggcaguccggcagcggcggggucuggcgcgagaugcaccaccucguggaguucgagcccccgcacgccgccacgauccgggugcuggcgcugggcaaccaggaggggucccucaagaccgcccugaccggcgccaugcgcgucaccaaggacacgaacgacaacaaccuguacaagcuccacgggggccacgugagcugccgggugaagcuguccgcccugacccucaagggcaccagcuacaagaucugcaccgacaagauguucuucgucaagaaccccacggacaccgggcacggcaccguggugaugcaggucaagguguccaagggggcgcccugccgcaucccggugaucgucgccgacgaccugaccgccgccaucaacaagggcauccuggugaccgugaacccgaucgccagcacgaacgacgacgagguccucaucgaggugaacccgcccuucggcgacuccuacaucaucguggggcggggcgacagccgccugaccuaccaguggcacaaggagggguccagcaucggcaagcuguucacccagaccaugaagggggucgagcggcuggcggugaugggcgacacggccugggacuucuccagcgccggcggguucuucaccuccgugggcaaggggauccacaccgucuucggcagcgccuuccaggggcuguucggcggccucaacuggaucaccaaggugaucaugggggccgugcugaucugggucggcaucaacacgcgcaacaugaccauguccaugagcaugauccucgugggggugaucaugauguuccugagccugggcgucggggcggaccagggcugcgccaucaacuucggcaagugaggacuagucccuguucccagagcccacuuuuuuuucuuuuuuugaaauaaaauagccugucuuucagaucuaaaaaaaaaaaaaaaaaaaaaaaaaaaaaaaaaaaaaaaaaaaaaaaaaaaaaaaaaaaaaaaaugcaucccccccccccccccccccccccccccccccaaaggcucuuuucagagccaccagaauu

SEQ ID NO: 1665 - RNA, 2371 nt, Artificial Sequence
  mRNA product Design a-2 comprising derived and/or modified sequence from YFV__NC_002031.1__X-SS-prMEdelstem_TM-JEV (polyprotein: aa92-681) (opt2)
gggagaguccgcucagccagguugcagaagcggcuuagcguguguccuaaucuucucucugcguguagguaggccugugccgcaaacaagcuuaccaugcgcggccucuccucccgcaagcgccgcucccacgacguccucaccguccaguuccucauccucggcaugcuccucaugaccggcggcgucacccucguccgcaagaaccgcuggcuccuccucaacgucaccuccgaggaccucggcaagaccuucuccgucggcaccggcaacugcaccaccaacauccucgaggccaaguacuggugccccgacuccauggaguacaacugccccaaccucuccccccgcgaggagcccgacgacaucgacugcuggugcuacggcgucgagaacguccgcgucgccuacggcaagugcgacuccgccggccgcucccgccgcucccgccgcgccaucgaccuccccacccacgagaaccacggccucaagacccgccaggagaaguggaugaccggccgcaugggcgagcgccagcuccagaagaucgagcgcugguucguccgcaaccccuucuucgccgucaccgcccucaccaucgccuaccucgucggcuccaacaugacccagcgcgucgucaucgcccuccucguccucgccgucggccccgccuacuccgcccacugcaucggcaucaccgaccgcgacuucaucgagggcguccacggcggcaccugggucuccgccacccucgagcaggacaagugcgucaccgucauggcccccgacaagcccucccucgacaucucccucgagaccgucgccaucgaccgccccgccgagguccgcaaggucugcuacaacgccguccucacccacgucaagaucaacgacaagugccccuccaccggcgaggcccaccucgccgaggagaacgagggcgacaacgccugcaagcgcaccuacuccgaccgcggcuggggcaacggcugcggccucuucggcaagggcuccaucgucgccugcgccaaguucaccugcgccaaguccaugucccucuucgaggucgaccagaccaagauccaguacgucauccgcgcccagcuccacgucggcgccaagcaggagaacuggaacaccgacaucaagacccucaaguucgacgcccucuccggcucccaggaggucgaguucaucggcuacggcaaggccacccucgagugccagguccagaccgccgucgacuucggcaacuccuacaucgccgagauggagaccgaguccuggaucgucgaccgccagugggcccaggaccucacccuccccuggcaguccggcuccggcggcgucuggcgcgagaugcaccaccucgucgaguucgagcccccccacgccgccaccauccgcguccucgcccucggcaaccaggagggcucccucaagaccgcccucaccggcgccaugcgcgucaccaaggacaccaacgacaacaaccucuacaagcuccacggcggccacgucuccugccgcgucaagcucuccgcccucacccucaagggcaccuccuacaagaucugcaccgacaagauguucuucgucaagaaccccaccgacaccggccacggcaccgucgucaugcaggucaaggucuccaagggcgcccccugccgcauccccgucaucgucgccgacgaccucaccgccgccaucaacaagggcauccucgucaccgucaaccccaucgccuccaccaacgacgacgagguccucaucgaggucaacccccccuucggcgacuccuacaucaucgucggccgcggcgacucccgccucaccuaccaguggcacaaggagggcuccuccaucggcuccacccucggcaaggccuucuccaccacccucaagggcgcccagcgccucgccgcccucggcgacaccgccugggacuucggcuccaucggcggcgucuucaacuccaucggccgcgccguccaccaggucuucggcggcgccuuccgcacccucuucggcggcauguccuggaucacccagggccucaugggcgcccuccuccucuggaugggcgucaacgcccgcgaccgcuccaucgcccucgccuuccucgccaccggcggcguccucgucuuccucgccaccaacguccacgccugaggacuagucccuguucccagagcccacuuuuuuuucuuuuuuugaaauaaaauagccugucuuucagaucuaaaaaaaaaaaaaaaaaaaaaaaaaaaaaaaaaaaaaaaaaaaaaaaaaaaaaaaaaaaaaaaaugcaucccccccccccccccccccccccccccccccaaaggcucuuuucagagccaccagaauu

SEQ ID NO: 1666 - RNA, 2344 nt, Artificial Sequence
  mRNA product Design a-2 comprising derived and/or modified sequence from YFV__NC_002031.1__SSjev(V3)-prMEdelstem_TM-JEV (polyprotein: aa122-681) (opt2)
gggagaguccgcucagccagguugcagaagcggcuuagcguguguccuaaucuucucucugcguguagguaggccugugccgcaaacaagcuuaccaugaacgagggcuccaucauguggcucgccucccucgccgucgucaucgccugcgccggcgccgucacccucguccgcaagaaccgcuggcuccuccucaacgucaccuccgaggaccucggcaagaccuucuccgucggcaccggcaacugcaccaccaacauccucgaggccaaguacuggugccccgacuccauggaguacaacugccccaaccucuccccccgcgaggagcccgacgacaucgacugcuggugcuacggcgucgagaacguccgcgucgccuacggcaagugcgacuccgccggccgcucccgccgcucccgccgcgccaucgaccuccccacccacgagaaccacggccucaagacccgccaggagaaguggaugaccggccgcaugggcgagcgccagcuccagaagaucgagcgcugguucguccgcaaccccuucuucgccgucaccgcccucaccaucgccuaccucgucggcuccaacaugacccagcgcgucgucaucgcccuccucguccucgccgucggccccgccuacuccgcccacugcaucggcaucaccgaccgcgacuucaucgagggcguccacggcggcaccugggucuccgccacccucgagcaggacaagugcgucaccgucauggcccccgacaagcccucccucgacaucucccucgagaccgucgccaucgaccgccccgccgagguccgcaaggucugcuacaacgccguccucacccacgucaagaucaacgacaagugccccuccaccggcgaggcccaccucgccgaggagaacgagggcgacaacgccugcaagcgcaccuacuccgaccgcggcuggggcaacggcugcggccucuucggcaagggcuccaucgucgccugcgccaaguucaccugcgccaaguccaugucccucuucgaggucgaccagaccaagauccaguacgucauccgcgcccagcuccacgucggcgccaagcaggagaacuggaacaccgacaucaagacccucaaguucgacgcccucuccggcucccaggaggucgaguucaucggcuacggcaaggccacccucgagugccagguccagaccgccgucgacuucggcaacuccuacaucgccgagauggagaccgaguccuggaucgucgaccgccagugggcccaggaccucacccuccccuggcaguccggcuccggcggcgucuggcgcgagaugcaccaccucgucgaguucgagcccccccacgccgccaccauccgcguccucgcccucggcaaccaggagggcucccucaagaccgcccucaccggcgccaugcgcgucaccaaggacaccaacgacaacaaccucuacaagcuccacggcggccacgucuccugccgcgucaagcucuccgcccucacccucaagggcaccuccuacaagaucugcaccgacaagauguucuucgucaagaaccccaccgacaccggccacggcaccgucgucaugcaggucaaggucuccaagggcgcccccugccgcauccccgucaucgucgccgacgaccucaccgccgccaucaacaagggcauccucgucaccgucaaccccaucgccuccaccaacgacgacgagguccucaucgaggucaacccccccuucggcgacuccuacaucaucgucggccgcggcgacucccgccucaccuaccaguggcacaaggagggcuccuccaucggcuccacccucggcaaggccuucuccaccacccucaagggcgcccagcgccucgccgcccucggcgacaccgccugggacuucggcuccaucggcggcgucuucaacuccaucggccgcgccguccaccaggucuucggcggcgccuuccgcacccucuucggcggcauguccuggaucacccagggccucaugggcgcccuccuccucuggaugggcgucaacgcccgcgaccgcuccaucgcccucgccuuccucgccaccggcggcguccucgucuuccucgccaccaacguccacgccugaggacuagucccuguucccagagcccacuuuuuuuucuuuuuuugaaauaaaauagccugucuuucagaucuaaaaaaaaaaaaaaaaaaaaaaaaaaaaaaaaaaaaaaaaaaaaaaaaaaaaaaaaaaaaaaaaugcaucccccccccccccccccccccccccccccccaaaggcucuuuucagagccaccagaauu

SEQ ID NO: 1667 - RNA, 2359 nt, Artificial Sequence
  mRNA product Design a-2 comprising derived and/or modified sequence from YFV__NC_002031.1__X-SS-prME (polyprotein: aa92-778) (opt2)
gggagaguccgcucagccagguugcagaagcggcuuagcguguguccuaaucuucucucugcguguagguaggccugugccgcaaacaagcuuaccaugcgcggccucuccucccgcaagcgccgcucccacgacguccucaccguccaguuccucauccucggcaugcuccucaugaccggcggcgucacccucguccgcaagaaccgcuggcuccuccucaacgucaccuccgaggaccucggcaagaccuucuccgucggcaccggcaacugcaccaccaacauccucgaggccaaguacuggugccccgacuccauggaguacaacugccccaaccucuccccccgcgaggagcccgacgacaucgacugcuggugcuacggcgucgagaacguccgcgucgccuacggcaagugcgacuccgccggccgcucccgccgcucccgccgcgccaucgaccuccccacccacgagaaccacggccucaagacccgccaggagaaguggaugaccggccgcaugggcgagcgccagcuccagaagaucgagcgcugguucguccgcaaccccuucuucgccgucaccgcccucaccaucgccuaccucgucggcuccaacaugacccagcgcgucgucaucgcccuccucguccucgccgucggccccgccuacuccgcccacugcaucggcaucaccgaccgcgacuucaucgagggcguccacggcggcaccugggucuccgccacccucgagcaggacaagugcgucaccgucauggcccccgacaagcccucccucgacaucucccucgagaccgucgccaucgaccgccccgccgagguccgcaaggucugcuacaacgccguccucacccacgucaagaucaacgacaagugccccuccaccggcgaggcccaccucgccgaggagaacgagggcgacaacgccugcaagcgcaccuacuccgaccgcggcuggggcaacggcugcggccucuucggcaagggcuccaucgucgccugcgccaaguucaccugcgccaaguccaugucccucuucgaggucgaccagaccaagauccaguacgucauccgcgcccagcuccacgucggcgccaagcaggagaacuggaacaccgacaucaagacccucaaguucgacgcccucuccggcucccaggaggucgaguucaucggcuacggcaaggccacccucgagugccagguccagaccgccgucgacuucggcaacuccuacaucgccgagauggagaccgaguccuggaucgucgaccgccagugggcccaggaccucacccuccccuggcaguccggcuccggcggcgucuggcgcgagaugcaccaccucgucgaguucgagcccccccacgccgccaccauccgcguccucgcccucggcaaccaggagggcucccucaagaccgcccucaccggcgccaugcgcgucaccaaggacaccaacgacaacaaccucuacaagcuccacggcggccacgucuccugccgcgucaagcucuccgcccucacccucaagggcaccuccuacaagaucugcaccgacaagauguucuucgucaagaaccccaccgacaccggccacggcaccgucgucaugcaggucaaggucuccaagggcgcccccugccgcauccccgucaucgucgccgacgaccucaccgccgccaucaacaagggcauccucgucaccgucaaccccaucgccuccaccaacgacgacgagguccucaucgaggucaacccccccuucggcgacuccuacaucaucgucggccgcggcgacucccgccucaccuaccaguggcacaaggagggcuccuccaucggcaagcucuucacccagaccaugaagggcgucgagcgccucgccgucaugggcgacaccgccugggacuucuccuccgccggcggcuucuucaccuccgucggcaagggcauccacaccgucuucggcuccgccuuccagggccucuucggcggccucaacuggaucaccaaggucaucaugggcgccguccucaucugggucggcaucaacacccgcaacaugaccauguccauguccaugauccucgucggcgucaucaugauguuccucucccucggcgucggcgccugaggacuagucccuguucccagagcccacuuuuuuuucuuuuuuugaaauaaaauagccugucuuucagaucuaaaaaaaaaaaaaaaaaaaaaaaaaaaaaaaaaaaaaaaaaaaaaaaaaaaaaaaaaaaaaaaaugcaucccccccccccccccccccccccccccccccaaaggcucuuuucagagccaccagaauu

SEQ ID NO: 1668 - RNA, 2362 nt, Artificial Sequence
  mRNA product Design a-2 comprising derived and/or modified sequence from YFV__NC_002031.1__SSjev(V3)-prME-XX (polyprotein: aa122-788) (opt2)
gggagaguccgcucagccagguugcagaagcggcuuagcguguguccuaaucuucucucugcguguagguaggccugugccgcaaacaagcuuaccaugaacgagggcuccaucauguggcucgccucccucgccgucgucaucgccugcgccggcgccgucacccucguccgcaagaaccgcuggcuccuccucaacgucaccuccgaggaccucggcaagaccuucuccgucggcaccggcaacugcaccaccaacauccucgaggccaaguacuggugccccgacuccauggaguacaacugccccaaccucuccccccgcgaggagcccgacgacaucgacugcuggugcuacggcgucgagaacguccgcgucgccuacggcaagugcgacuccgccggccgcucccgccgcucccgccgcgccaucgaccuccccacccacgagaaccacggccucaagacccgccaggagaaguggaugaccggccgcaugggcgagcgccagcuccagaagaucgagcgcugguucguccgcaaccccuucuucgccgucaccgcccucaccaucgccuaccucgucggcuccaacaugacccagcgcgucgucaucgcccuccucguccucgccgucggccccgccuacuccgcccacugcaucggcaucaccgaccgcgacuucaucgagggcguccacggcggcaccugggucuccgccacccucgagcaggacaagugcgucaccgucauggcccccgacaagcccucccucgacaucucccucgagaccgucgccaucgaccgccccgccgagguccgcaaggucugcuacaacgccguccucacccacgucaagaucaacgacaagugccccuccaccggcgaggcccaccucgccgaggagaacgagggcgacaacgccugcaagcgcaccuacuccgaccgcggcuggggcaacggcugcggccucuucggcaagggcuccaucgucgccugcgccaaguucaccugcgccaaguccaugucccucuucgaggucgaccagaccaagauccaguacgucauccgcgcccagcuccacgucggcgccaagcaggagaacuggaacaccgacaucaagacccucaaguucgacgcccucuccggcucccaggaggucgaguucaucggcuacggcaaggccacccucgagugccagguccagaccgccgucgacuucggcaacuccuacaucgccgagauggagaccgaguccuggaucgucgaccgccagugggcccaggaccucacccuccccuggcaguccggcuccggcggcgucuggcgcgagaugcaccaccucgucgaguucgagcccccccacgccgccaccauccgcguccucgcccucggcaaccaggagggcucccucaagaccgcccucaccggcgccaugcgcgucaccaaggacaccaacgacaacaaccucuacaagcuccacggcggccacgucuccugccgcgucaagcucuccgcccucacccucaagggcaccuccuacaagaucugcaccgacaagauguucuucgucaagaaccccaccgacaccggccacggcaccgucgucaugcaggucaaggucuccaagggcgcccccugccgcauccccgucaucgucgccgacgaccucaccgccgccaucaacaagggcauccucgucaccgucaaccccaucgccuccaccaacgacgacgagguccucaucgaggucaacccccccuucggcgacuccuacaucaucgucggccgcggcgacucccgccucaccuaccaguggcacaaggagggcuccuccaucggcaagcucuucacccagaccaugaagggcgucgagcgccucgccgucaugggcgacaccgccugggacuucuccuccgccggcggcuucuucaccuccgucggcaagggcauccacaccgucuucggcuccgccuuccagggccucuucggcggccucaacuggaucaccaaggucaucaugggcgccguccucaucugggucggcaucaacacccgcaacaugaccauguccauguccaugauccucgucggcgucaucaugauguuccucucccucggcgucggcgccgaccagggcugcgccaucaacuucggcaagugaggacuagucccuguucccagagcccacuuuuuuuucuuuuuuugaaauaaaauagccugucuuucagaucuaaaaaaaaaaaaaaaaaaaaaaaaaaaaaaaaaaaaaaaaaaaaaaaaaaaaaaaaaaaaaaaaugcaucccccccccccccccccccccccccccccccaaaggcucuuuucagagccaccagaauu

SEQ ID NO: 1669 - RNA, 2371 nt, Artificial Sequence
  mRNA product Design a-2 comprising derived and/or modified sequence from YFV__NC_002031.1__X-SS-prMEdelstem_TM-JEV (polyprotein: aa92-681) (opt3)
gggagaguccgcucagccagguugcagaagcggcuuagcguguguccuaaucuucucucugcguguagguaggccugugccgcaaacaagcuuaccaugagaggccugagcuccaggaagcggcgcucucacgacgugcucaccguccaguuccuuauccuggggauguuguuaaugacaggagguguuacucuggugcguaaaaaccgauggcuacuccugaauguaacgucagaggaucuuggcaagaccuuuaguguggggacaggaaacugcacuaccaauauucuggaagccaaauacuggugucccgacagcauggaguauaacugcccuaauuuguccccaagagaggaaccggaugacauagauuguuggugcuacggcgucgaaaacgugaggguugcuuaugguaagugugacucugcagggcggucgcgcagaucaaggcgggccaucgaucuccccacacaugagaaucacggacugaaaacccgccaagagaaguggaugacuggccgaaugggcgaaagacagcugcagaagauugagaggugguucgugcggaacccuuucuucgcggucacagcucucaccaucgccuacuuaguggggagcaauaugacgcagcguguaguuauugcacugcuuguguuggccgucggaccagcuuauagugcacauugcaucgguauaacugaccgcgauuuuaucgaaggcgugcacgggggaaccuggguguccgccacacuggagcaagacaaaugugucacuguuauggcucccgauaagccuucucuagacauuagccucgagaccguggccaucgauagaccagcggaaguaaggaaagugugcuacaacgcaguccugacacaugugaagauuaaugacaaaugucccuccaccggcgaggcccaccuugcugaagagaacgaaggugacaaugccugcaagcggacguauucagaucgaggguggggaaacggcuguggccuguucgggaagggaaguaucguugcaugcgcuaaauuuacuugcgccaagagcaugucuuuguucgagguggaccagacaaaaauacaguacgucauucgcgcgcagcuccacgugggugccaagcaagagaauuggaacaccgauaucaaaacucugaaguuugacgcauuauccggcucacaggaaguagaguucauuggguacggaaaagcuacacuggaaugucagguucagaccgccguggauuuuggcaacagcuauaucgcugagauggaaacggagaguuggaucgucgacagacaaugggcccaggaucucacccuuccuuggcagucugguuccgggggcguguggagggagaugcaucaccuggucgaauuugagccaccgcaugcagccacaauucggguguuggcucuaggaaaucaagaaggcagccugaagacugcgcucaccggggcaaugcgcguuacaaaggacacuaacgauaauaaccuguacaaacuucacggaggucacgugucgugcagaguaaagcugucugccuugacccucaaaggcacauccuauaagauauguaccgacaaaauguuuuucgucaagaaucccacugauacggggcauggaacagugguuaugcaagugaaggucucaaaaggcgcuccuugcaggaucccagugauuguagccgacgaccugaccgcagccaucaacaaggguauauuagugacuguuaaucccauugcuaguaccaacgaugacgagguccugaucgaagugaauccuccauucggggauagcuacaucauugugggccguggagacucccggcuaacauaucaguggcacaaagagggcucuagcaucggcagcacccuggggaaggccuucuccacaacucucaaaggagcucagagacuugcagcccugggugacacggcgugggauuuuggcucuaucgggggaguguucaacucaauuggcagggcuguccaccaaguuuuugguggggccuuccggaccuuguuuggaggcaugaguuggauaacacagggcuuaaugggggcacugcuacucuggaugggagugaaugcccgcgaccgaagcaucgcucuggcauuccuugccacugguggcguacugguguuuuuggcuaccaacguccaugccugaggacuagucccuguucccagagcccacuuuuuuuucuuuuuuugaaauaaaauagccugucuuucagaucuaaaaaaaaaaaaaaaaaaaaaaaaaaaaaaaaaaaaaaaaaaaaaaaaaaaaaaaaaaaaaaaaugcaucccccccccccccccccccccccccccccccaaaggcucuuuucagagccaccagaauu

SEQ ID NO: 1670 - RNA, 2344 nt, Artificial Sequence
  mRNA product Design a-2 comprising derived and/or modified sequence from YFV__NC_002031.1__SSjev(V3)-prMEdelstem_TM-JEV (polyprotein: aa122-681) (opt3)
gggagaguccgcucagccagguugcagaagcggcuuagcguguguccuaaucuucucucugcguguagguaggccugugccgcaaacaagcuuaccaugaacgagggcagcaucauguggcuggccucccucgcuguggucauugcaugcgccggggcgguuacucuggugcguaaaaaccgauggcuacuccugaauguaacgucagaggaucuuggcaagaccuuuaguguggggacaggaaacugcacuaccaauauucuggaagccaaauacuggugucccgacagcauggaguauaacugcccuaauuuguccccaagagaggaaccggaugacauagauuguuggugcuacggcgucgaaaacgugaggguugcuuaugguaagugugacucugcagggcggucgcgcagaucaaggcgggccaucgaucuccccacacaugagaaucacggacugaaaacccgccaagagaaguggaugacuggccgaaugggcgaaagacagcugcagaagauugagaggugguucgugcggaacccuuucuucgcggucacagcucucaccaucgccuacuuaguggggagcaauaugacgcagcguguaguuauugcacugcuuguguuggccgucggaccagcuuauagugcacauugcaucgguauaacugaccgcgauuuuaucgaaggcgugcacgggggaaccuggguguccgccacacuggagcaagacaaaugugucacuguuauggcucccgauaagccuucucuagacauuagccucgagaccguggccaucgauagaccagcggaaguaaggaaagugugcuacaacgcaguccugacacaugugaagauuaaugacaaaugucccuccaccggcgaggcccaccuugcugaagagaacgaaggugacaaugccugcaagcggacguauucagaucgaggguggggaaacggcuguggccuguucgggaagggaaguaucguugcaugcgcuaaauuuacuugcgccaagagcaugucuuuguucgagguggaccagacaaaaauacaguacgucauucgcgcgcagcuccacgugggugccaagcaagagaauuggaacaccgauaucaaaacucugaaguuugacgcauuauccggcucacaggaaguagaguucauuggguacggaaaagcuacacuggaaugucagguucagaccgccguggauuuuggcaacagcuauaucgcugagauggaaacggagaguuggaucgucgacagacaaugggcccaggaucucacccuuccuuggcagucugguuccgggggcguguggagggagaugcaucaccuggucgaauuugagccaccgcaugcagccacaauucggguguuggcucuaggaaaucaagaaggcagccugaagacugcgcucaccggggcaaugcgcguuacaaaggacacuaacgauaauaaccuguacaaacuucacggaggucacgugucgugcagaguaaagcugucugccuugacccucaaaggcacauccuauaagauauguaccgacaaaauguuuuucgucaagaaucccacugauacggggcauggaacagugguuaugcaagugaaggucucaaaaggcgcuccuugcaggaucccagugauuguagccgacgaccugaccgcagccaucaacaaggguauauuagugacuguuaaucccauugcuaguaccaacgaugacgagguccugaucgaagugaauccuccauucggggauagcuacaucauugugggccguggagacucccggcuaacauaucaguggcacaaagagggcucuagcaucggcagcacccuggggaaggccuucuccacaacucucaaaggagcucagagacuugcagcccugggugacacggcgugggauuuuggcucuaucgggggaguguucaacucaauuggcagggcuguccaccaaguuuuugguggggccuuccggaccuuguuuggaggcaugaguuggauaacacagggcuuaaugggggcacugcuacucuggaugggagugaaugcccgcgaccgaagcaucgcucuggcauuccuugccacugguggcguacugguguuuuuggcuaccaacguccaugccugaggacuagucccuguucccagagcccacuuuuuuuucuuuuuuugaaauaaaauagccugucuuucagaucuaaaaaaaaaaaaaaaaaaaaaaaaaaaaaaaaaaaaaaaaaaaaaaaaaaaaaaaaaaaaaaaaugcaucccccccccccccccccccccccccccccccaaaggcucuuuucagagccaccagaauu

SEQ ID NO: 1671 - RNA, 2359 nt, Artificial Sequence
  mRNA product Design a-2 comprising derived and/or modified sequence from YFV__NC_002031.1__X-SS-prME (polyprotein: aa92-778) (opt3)
gggagaguccgcucagccagguugcagaagcggcuuagcguguguccuaaucuucucucugcguguagguaggccugugccgcaaacaagcuuaccaugagaggccugagcuccaggaagcggcgcucucacgacgugcucaccguccaguuccuuauccuggggauguuguuaaugacaggagguguuacucuggugcguaaaaaccgauggcuacuccugaauguaacgucagaggaucuuggcaagaccuuuaguguggggacaggaaacugcacuaccaauauucuggaagccaaauacuggugucccgacagcauggaguauaacugcccuaauuuguccccaagagaggaaccggaugacauagauuguuggugcuacggcgucgaaaacgugaggguugcuuaugguaagugugacucugcagggcggucgcgcagaucaaggcgggccaucgaucuccccacacaugagaaucacggacugaaaacccgccaagagaaguggaugacuggccgaaugggcgaaagacagcugcagaagauugagaggugguucgugcggaacccuuucuucgcggucacagcucucaccaucgccuacuuaguggggagcaauaugacgcagcguguaguuauugcacugcuuguguuggccgucggaccagcuuauagugcacauugcaucgguauaacugaccgcgauuuuaucgaaggcgugcacgggggaaccuggguguccgccacacuggagcaagacaaaugugucacuguuauggcucccgauaagccuucucuagacauuagccucgagaccguggccaucgauagaccagcggaaguaaggaaagugugcuacaacgcaguccugacacaugugaagauuaaugacaaaugucccuccaccggcgaggcccaccuugcugaagagaacgaaggugacaaugccugcaagcggacguauucagaucgaggguggggaaacggcuguggccuguucgggaagggaaguaucguugcaugcgcuaaauuuacuugcgccaagagcaugucuuuguucgagguggaccagacaaaaauacaguacgucauucgcgcgcagcuccacgugggugccaagcaagagaauuggaacaccgauaucaaaacucugaaguuugacgcauuauccggcucacaggaaguagaguucauuggguacggaaaagcuacacuggaaugucagguucagaccgccguggauuuuggcaacagcuauaucgcugagauggaaacggagaguuggaucgucgacagacaaugggcccaggaucucacccuuccuuggcagucugguuccgggggcguguggagggagaugcaucaccuggucgaauuugagccaccgcaugcagccacaauucggguguuggcucuaggaaaucaagaaggcagccugaagacugcgcucaccggggcaaugcgcguuacaaaggacacuaacgauaauaaccuguacaaacuucacggaggucacgugucgugcagaguaaagcugucugccuugacccucaaaggcacauccuauaagauauguaccgacaaaauguuuuucgucaagaaucccacugauacggggcauggaacagugguuaugcaagugaaggucucaaaaggcgcuccuugcaggaucccagugauuguagccgacgaccugaccgcagccaucaacaaggguauauuagugacuguuaaucccauugcuaguaccaacgaugacgagguccugaucgaagugaauccuccauucggggauagcuacaucauugugggccguggagacucccggcuaacauaucaguggcacaaagagggcucuagcaucgggaagcucuuuacccagacuaugaaaggagucgagcgacuggccguuaugggugauacagcaugggacuucucaagugcgggcggguuuuucacguccgugggaaagggcauucauaccguguuugguagcgcuuuccaggggcuuuuuggcggauugaacuggauaacuaagguaaucaugggcgccguccugauuuggguggggaucaauacaagaaacaugaccaugucuaugucaaugauccucguuggagugauuaugauguuccugagucuuggcgucggugcaugaggacuagucccuguucccagagcccacuuuuuuuucuuuuuuugaaauaaaauagccugucuuucagaucuaaaaaaaaaaaaaaaaaaaaaaaaaaaaaaaaaaaaaaaaaaaaaaaaaaaaaaaaaaaaaaaaugcaucccccccccccccccccccccccccccccccaaaggcucuuuucagagccaccagaauu

SEQ ID NO: 1672 - RNA, 2362 nt, Artificial Sequence
  mRNA product Design a-2 comprising derived and/or modified sequence from YFV__NC_002031.1__SSjev(V3)-prME-XX (polyprotein: aa122-788) (opt3)
gggagaguccgcucagccagguugcagaagcggcuuagcguguguccuaaucuucucucugcguguagguaggccugugccgcaaacaagcuuaccaugaacgagggcagcaucauguggcuggccucccucgcuguggucauugcaugcgccggggcgguuacucuggugcguaaaaaccgauggcuacuccugaauguaacgucagaggaucuuggcaagaccuuuaguguggggacaggaaacugcacuaccaauauucuggaagccaaauacuggugucccgacagcauggaguauaacugcccuaauuuguccccaagagaggaaccggaugacauagauuguuggugcuacggcgucgaaaacgugaggguugcuuaugguaagugugacucugcagggcggucgcgcagaucaaggcgggccaucgaucuccccacacaugagaaucacggacugaaaacccgccaagagaaguggaugacuggccgaaugggcgaaagacagcugcagaagauugagaggugguucgugcggaacccuuucuucgcggucacagcucucaccaucgccuacuuaguggggagcaauaugacgcagcguguaguuauugcacugcuuguguuggccgucggaccagcuuauagugcacauugcaucgguauaacugaccgcgauuuuaucgaaggcgugcacgggggaaccuggguguccgccacacuggagcaagacaaaugugucacuguuauggcucccgauaagccuucucuagacauuagccucgagaccguggccaucgauagaccagcggaaguaaggaaagugugcuacaacgcaguccugacacaugugaagauuaaugacaaaugucccuccaccggcgaggcccaccuugcugaagagaacgaaggugacaaugccugcaagcggacguauucagaucgaggguggggaaacggcuguggccuguucgggaagggaaguaucguugcaugcgcuaaauuuacuugcgccaagagcaugucuuuguucgagguggaccagacaaaaauacaguacgucauucgcgcgcagcuccacgugggugccaagcaagagaauuggaacaccgauaucaaaacucugaaguuugacgcauuauccggcucacaggaaguagaguucauuggguacggaaaagcuacacuggaaugucagguucagaccgccguggauuuuggcaacagcuauaucgcugagauggaaacggagaguuggaucgucgacagacaaugggcccaggaucucacccuuccuuggcagucugguuccgggggcguguggagggagaugcaucaccuggucgaauuugagccaccgcaugcagccacaauucggguguuggcucuaggaaaucaagaaggcagccugaagacugcgcucaccggggcaaugcgcguuacaaaggacacuaacgauaauaaccuguacaaacuucacggaggucacgugucgugcagaguaaagcugucugccuugacccucaaaggcacauccuauaagauauguaccgacaaaauguuuuucgucaagaaucccacugauacggggcauggaacagugguuaugcaagugaaggucucaaaaggcgcuccuugcaggaucccagugauuguagccgacgaccugaccgcagccaucaacaaggguauauuagugacuguuaaucccauugcuaguaccaacgaugacgagguccugaucgaagugaauccuccauucggggauagcuacaucauugugggccguggagacucccggcuaacauaucaguggcacaaagagggcucuagcaucgggaagcucuuuacccagacuaugaaaggagucgagcgacuggccguuaugggugauacagcaugggacuucucaagugcgggcggguuuuucacguccgugggaaagggcauucauaccguguuugguagcgcuuuccaggggcuuuuuggcggauugaacuggauaacuaagguaaucaugggcgccguccugauuuggguggggaucaauacaagaaacaugaccaugucuaugucaaugauccucguuggagugauuaugauguuccugagucuuggcgucggugcagaucaggggugugccauaaauuuuggaaaaugaggacuagucccuguucccagagcccacuuuuuuuucuuuuuuugaaauaaaauagccugucuuucagaucuaaaaaaaaaaaaaaaaaaaaaaaaaaaaaaaaaaaaaaaaaaaaaaaaaaaaaaaaaaaaaaaaugcaucccccccccccccccccccccccccccccccaaaggcucuuuucagagccaccagaauu

SEQ ID NO: 1673 - RNA, 2371 nt, Artificial Sequence
  mRNA product Design a-2 comprising derived and/or modified sequence from YFV__NC_002031.1__X-SS-prMEdelstem_TM-JEV (polyprotein: aa92-681) (opt4)
gggagaguccgcucagccagguugcagaagcggcuuagcguguguccuaaucuucucucugcguguagguaggccugugccgcaaacaagcuuaccaugagaggccugagcagcagaaagagaagaagccacgacgugcugaccgugcaguuccugauccugggcaugcugcugaugaccggcggcgugacccuggugagaaagaacagauggcugcugcugaacgugaccagcgaggaccugggcaagaccuucagcgugggcaccggcaacugcaccaccaacauccuggaggccaaguacuggugccccgacagcauggaguacaacugccccaaccugagccccagagaggagcccgacgacaucgacugcuggugcuacggcguggagaacgugagaguggccuacggcaagugcgacagcgccggcagaagcagaagaagcagaagagccaucgaccugcccacccacgagaaccacggccugaagaccagacaggagaaguggaugaccggcagaaugggcgagagacagcugcagaagaucgagagaugguucgugagaaaccccuucuucgccgugaccgcccugaccaucgccuaccuggugggcagcaacaugacccagagaguggugaucgcccugcuggugcuggccgugggccccgccuacagcgcccacugcaucggcaucaccgacagagacuucaucgagggcgugcacggcggcaccugggugagcgccacccuggagcaggacaagugcgugaccgugauggcccccgacaagcccagccuggacaucagccuggagaccguggccaucgacagacccgccgaggugagaaaggugugcuacaacgccgugcugacccacgugaagaucaacgacaagugccccagcaccggcgaggcccaccuggccgaggagaacgagggcgacaacgccugcaagagaaccuacagcgacagaggcuggggcaacggcugcggccuguucggcaagggcagcaucguggccugcgccaaguucaccugcgccaagagcaugagccuguucgagguggaccagaccaagauccaguacgugaucagagcccagcugcacgugggcgccaagcaggagaacuggaacaccgacaucaagacccugaaguucgacgcccugagcggcagccaggagguggaguucaucggcuacggcaaggccacccuggagugccaggugcagaccgccguggacuucggcaacagcuacaucgccgagauggagaccgagagcuggaucguggacagacagugggcccaggaccugacccugcccuggcagagcggcagcggcggcguguggagagagaugcaccaccugguggaguucgagcccccccacgccgccaccaucagagugcuggcccugggcaaccaggagggcagccugaagaccgcccugaccggcgccaugagagugaccaaggacaccaacgacaacaaccuguacaagcugcacggcggccacgugagcugcagagugaagcugagcgcccugacccugaagggcaccagcuacaagaucugcaccgacaagauguucuucgugaagaaccccaccgacaccggccacggcaccguggugaugcaggugaaggugagcaagggcgcccccugcagaauccccgugaucguggccgacgaccugaccgccgccaucaacaagggcauccuggugaccgugaaccccaucgccagcaccaacgacgacgaggugcugaucgaggugaacccccccuucggcgacagcuacaucaucgugggcagaggcgacagcagacugaccuaccaguggcacaaggagggcagcagcaucggcagcacccugggcaaggccuucagcaccacccugaagggcgcccagagacuggccgcccugggcgacaccgccugggacuucggcagcaucggcggcguguucaacagcaucggcagagccgugcaccagguguucggcggcgccuucagaacccuguucggcggcaugagcuggaucacccagggccugaugggcgcccugcugcuguggaugggcgugaacgccagagacagaagcaucgcccuggccuuccuggccaccggcggcgugcugguguuccuggccaccaacgugcacgccugaggacuagucccuguucccagagcccacuuuuuuuucuuuuuuugaaauaaaauagccugucuuucagaucuaaaaaaaaaaaaaaaaaaaaaaaaaaaaaaaaaaaaaaaaaaaaaaaaaaaaaaaaaaaaaaaaugcaucccccccccccccccccccccccccccccccaaaggcucuuuucagagccaccagaauu

SEQ ID NO: 1674 - RNA, 2344 nt, Artificial Sequence
  mRNA product Design a-2 comprising derived and/or modified sequence from YFV__NC_002031.1__SSjev(V3)-prMEdelstem_TM-JEV (polyprotein: aa122-681) (opt4)
gggagaguccgcucagccagguugcagaagcggcuuagcguguguccuaaucuucucucugcguguagguaggccugugccgcaaacaagcuuaccaugaacgagggcagcaucauguggcuggccagccuggccguggugaucgccugcgccggcgccgugacccuggugagaaagaacagauggcugcugcugaacgugaccagcgaggaccugggcaagaccuucagcgugggcaccggcaacugcaccaccaacauccuggaggccaaguacuggugccccgacagcauggaguacaacugccccaaccugagccccagagaggagcccgacgacaucgacugcuggugcuacggcguggagaacgugagaguggccuacggcaagugcgacagcgccggcagaagcagaagaagcagaagagccaucgaccugcccacccacgagaaccacggccugaagaccagacaggagaaguggaugaccggcagaaugggcgagagacagcugcagaagaucgagagaugguucgugagaaaccccuucuucgccgugaccgcccugaccaucgccuaccuggugggcagcaacaugacccagagaguggugaucgcccugcuggugcuggccgugggccccgccuacagcgcccacugcaucggcaucaccgacagagacuucaucgagggcgugcacggcggcaccugggugagcgccacccuggagcaggacaagugcgugaccgugauggcccccgacaagcccagccuggacaucagccuggagaccguggccaucgacagacccgccgaggugagaaaggugugcuacaacgccgugcugacccacgugaagaucaacgacaagugccccagcaccggcgaggcccaccuggccgaggagaacgagggcgacaacgccugcaagagaaccuacagcgacagaggcuggggcaacggcugcggccuguucggcaagggcagcaucguggccugcgccaaguucaccugcgccaagagcaugagccuguucgagguggaccagaccaagauccaguacgugaucagagcccagcugcacgugggcgccaagcaggagaacuggaacaccgacaucaagacccugaaguucgacgcccugagcggcagccaggagguggaguucaucggcuacggcaaggccacccuggagugccaggugcagaccgccguggacuucggcaacagcuacaucgccgagauggagaccgagagcuggaucguggacagacagugggcccaggaccugacccugcccuggcagagcggcagcggcggcguguggagagagaugcaccaccugguggaguucgagcccccccacgccgccaccaucagagugcuggcccugggcaaccaggagggcagccugaagaccgcccugaccggcgccaugagagugaccaaggacaccaacgacaacaaccuguacaagcugcacggcggccacgugagcugcagagugaagcugagcgcccugacccugaagggcaccagcuacaagaucugcaccgacaagauguucuucgugaagaaccccaccgacaccggccacggcaccguggugaugcaggugaaggugagcaagggcgcccccugcagaauccccgugaucguggccgacgaccugaccgccgccaucaacaagggcauccuggugaccgugaaccccaucgccagcaccaacgacgacgaggugcugaucgaggugaacccccccuucggcgacagcuacaucaucgugggcagaggcgacagcagacugaccuaccaguggcacaaggagggcagcagcaucggcagcacccugggcaaggccuucagcaccacccugaagggcgcccagagacuggccgcccugggcgacaccgccugggacuucggcagcaucggcggcguguucaacagcaucggcagagccgugcaccagguguucggcggcgccuucagaacccuguucggcggcaugagcuggaucacccagggccugaugggcgcccugcugcuguggaugggcgugaacgccagagacagaagcaucgcccuggccuuccuggccaccggcggcgugcugguguuccuggccaccaacgugcacgccugaggacuagucccuguucccagagcccacuuuuuuuucuuuuuuugaaauaaaauagccugucuuucagaucuaaaaaaaaaaaaaaaaaaaaaaaaaaaaaaaaaaaaaaaaaaaaaaaaaaaaaaaaaaaaaaaaugcaucccccccccccccccccccccccccccccccaaaggcucuuuucagagccaccagaauu

SEQ ID NO: 1675 - RNA, 2359 nt, Artificial Sequence
  mRNA product Design a-2 comprising derived and/or modified sequence from YFV__NC_002031.1__X-SS-prME (polyprotein: aa92-778) (opt4)
gggagaguccgcucagccagguugcagaagcggcuuagcguguguccuaaucuucucucugcguguagguaggccugugccgcaaacaagcuuaccaugagaggccugagcagcagaaagagaagaagccacgacgugcugaccgugcaguuccugauccugggcaugcugcugaugaccggcggcgugacccuggugagaaagaacagauggcugcugcugaacgugaccagcgaggaccugggcaagaccuucagcgugggcaccggcaacugcaccaccaacauccuggaggccaaguacuggugccccgacagcauggaguacaacugccccaaccugagccccagagaggagcccgacgacaucgacugcuggugcuacggcguggagaacgugagaguggccuacggcaagugcgacagcgccggcagaagcagaagaagcagaagagccaucgaccugcccacccacgagaaccacggccugaagaccagacaggagaaguggaugaccggcagaaugggcgagagacagcugcagaagaucgagagaugguucgugagaaaccccuucuucgccgugaccgcccugaccaucgccuaccuggugggcagcaacaugacccagagaguggugaucgcccugcuggugcuggccgugggccccgccuacagcgcccacugcaucggcaucaccgacagagacuucaucgagggcgugcacggcggcaccugggugagcgccacccuggagcaggacaagugcgugaccgugauggcccccgacaagcccagccuggacaucagccuggagaccguggccaucgacagacccgccgaggugagaaaggugugcuacaacgccgugcugacccacgugaagaucaacgacaagugccccagcaccggcgaggcccaccuggccgaggagaacgagggcgacaacgccugcaagagaaccuacagcgacagaggcuggggcaacggcugcggccuguucggcaagggcagcaucguggccugcgccaaguucaccugcgccaagagcaugagccuguucgagguggaccagaccaagauccaguacgugaucagagcccagcugcacgugggcgccaagcaggagaacuggaacaccgacaucaagacccugaaguucgacgcccugagcggcagccaggagguggaguucaucggcuacggcaaggccacccuggagugccaggugcagaccgccguggacuucggcaacagcuacaucgccgagauggagaccgagagcuggaucguggacagacagugggcccaggaccugacccugcccuggcagagcggcagcggcggcguguggagagagaugcaccaccugguggaguucgagcccccccacgccgccaccaucagagugcuggcccugggcaaccaggagggcagccugaagaccgcccugaccggcgccaugagagugaccaaggacaccaacgacaacaaccuguacaagcugcacggcggccacgugagcugcagagugaagcugagcgcccugacccugaagggcaccagcuacaagaucugcaccgacaagauguucuucgugaagaaccccaccgacaccggccacggcaccguggugaugcaggugaaggugagcaagggcgcccccugcagaauccccgugaucguggccgacgaccugaccgccgccaucaacaagggcauccuggugaccgugaaccccaucgccagcaccaacgacgacgaggugcugaucgaggugaacccccccuucggcgacagcuacaucaucgugggcagaggcgacagcagacugaccuaccaguggcacaaggagggcagcagcaucggcaagcuguucacccagaccaugaagggcguggagagacuggccgugaugggcgacaccgccugggacuucagcagcgccggcggcuucuucaccagcgugggcaagggcauccacaccguguucggcagcgccuuccagggccuguucggcggccugaacuggaucaccaaggugaucaugggcgccgugcugaucugggugggcaucaacaccagaaacaugaccaugagcaugagcaugauccuggugggcgugaucaugauguuccugagccugggcgugggcgccugaggacuagucccuguucccagagcccacuuuuuuuucuuuuuuugaaauaaaauagccugucuuucagaucuaaaaaaaaaaaaaaaaaaaaaaaaaaaaaaaaaaaaaaaaaaaaaaaaaaaaaaaaaaaaaaaaugcaucccccccccccccccccccccccccccccccaaaggcucuuuucagagccaccagaauu

SEQ ID NO: 1676 - RNA, 2362 nt, Artificial Sequence
  mRNA product Design a-2 comprising derived and/or modified sequence from YFV__NC_002031.1__SSjev(V3)-prME-XX (polyprotein: aa122-788) (opt4)
gggagaguccgcucagccagguugcagaagcggcuuagcguguguccuaaucuucucucugcguguagguaggccugugccgcaaacaagcuuaccaugaacgagggcagcaucauguggcuggccagccuggccguggugaucgccugcgccggcgccgugacccuggugagaaagaacagauggcugcugcugaacgugaccagcgaggaccugggcaagaccuucagcgugggcaccggcaacugcaccaccaacauccuggaggccaaguacuggugccccgacagcauggaguacaacugccccaaccugagccccagagaggagcccgacgacaucgacugcuggugcuacggcguggagaacgugagaguggccuacggcaagugcgacagcgccggcagaagcagaagaagcagaagagccaucgaccugcccacccacgagaaccacggccugaagaccagacaggagaaguggaugaccggcagaaugggcgagagacagcugcagaagaucgagagaugguucgugagaaaccccuucuucgccgugaccgcccugaccaucgccuaccuggugggcagcaacaugacccagagaguggugaucgcccugcuggugcuggccgugggccccgccuacagcgcccacugcaucggcaucaccgacagagacuucaucgagggcgugcacggcggcaccugggugagcgccacccuggagcaggacaagugcgugaccgugauggcccccgacaagcccagccuggacaucagccuggagaccguggccaucgacagacccgccgaggugagaaaggugugcuacaacgccgugcugacccacgugaagaucaacgacaagugccccagcaccggcgaggcccaccuggccgaggagaacgagggcgacaacgccugcaagagaaccuacagcgacagaggcuggggcaacggcugcggccuguucggcaagggcagcaucguggccugcgccaaguucaccugcgccaagagcaugagccuguucgagguggaccagaccaagauccaguacgugaucagagcccagcugcacgugggcgccaagcaggagaacuggaacaccgacaucaagacccugaaguucgacgcccugagcggcagccaggagguggaguucaucggcuacggcaaggccacccuggagugccaggugcagaccgccguggacuucggcaacagcuacaucgccgagauggagaccgagagcuggaucguggacagacagugggcccaggaccugacccugcccuggcagagcggcagcggcggcguguggagagagaugcaccaccugguggaguucgagcccccccacgccgccaccaucagagugcuggcccugggcaaccaggagggcagccugaagaccgcccugaccggcgccaugagagugaccaaggacaccaacgacaacaaccuguacaagcugcacggcggccacgugagcugcagagugaagcugagcgcccugacccugaagggcaccagcuacaagaucugcaccgacaagauguucuucgugaagaaccccaccgacaccggccacggcaccguggugaugcaggugaaggugagcaagggcgcccccugcagaauccccgugaucguggccgacgaccugaccgccgccaucaacaagggcauccuggugaccgugaaccccaucgccagcaccaacgacgacgaggugcugaucgaggugaacccccccuucggcgacagcuacaucaucgugggcagaggcgacagcagacugaccuaccaguggcacaaggagggcagcagcaucggcaagcuguucacccagaccaugaagggcguggagagacuggccgugaugggcgacaccgccugggacuucagcagcgccggcggcuucuucaccagcgugggcaagggcauccacaccguguucggcagcgccuuccagggccuguucggcggccugaacuggaucaccaaggugaucaugggcgccgugcugaucugggugggcaucaacaccagaaacaugaccaugagcaugagcaugauccuggugggcgugaucaugauguuccugagccugggcgugggcgccgaccagggcugcgccaucaacuucggcaagugaggacuagucccuguucccagagcccacuuuuuuuucuuuuuuugaaauaaaauagccugucuuucagaucuaaaaaaaaaaaaaaaaaaaaaaaaaaaaaaaaaaaaaaaaaaaaaaaaaaaaaaaaaaaaaaaaugcaucccccccccccccccccccccccccccccccaaaggcucuuuucagagccaccagaauu

SEQ ID NO: 1677 - RNA, 2371 nt, Artificial Sequence
  mRNA product Design a-2 comprising derived and/or modified sequence from YFV__NC_002031.1__X-SS-prMEdelstem_TM-JEV (polyprotein: aa92-681) (opt5)
gggagaguccgcucagccagguugcagaagcggcuuagcguguguccuaaucuucucucugcguguagguaggccugugccgcaaacaagcuuaccaugagaggccugagcucccggaagcgcagaucucacgacgugcucaccguccaguuccugauccuugggaugcugcucaugacaggaggcguuacgcuggugcggaaaaaccgcuggcuucugcucaaugugaccagcgaggaucuggggaagacauuuuccgucggaaccggcaacugcacaaccaauauucuggaagccaaauacuggugucccgacucuauggaguauaacugcccuaaucucagcccgagagaagaacccgaugacaucgauuguuggugcuacgggguggaaaacguucggguggcuuauggaaagugugacuccgccggccgcucuagacggagccgcagagcgauugaucugccuacacaugagaaucacggccuuaaaacccggcaagagaaguggaugacggggcgcaugggagaaagacagcugcagaagaucgagcggugguucguccgcaaccccuuuuucgcugugaccgcccucacaauugccuaccugguuggcuccaauaugacccagagaguggucaucgcccuucuggugcucgcuguggggccugcuuauagcgcccauugcaucggaauuacagaccgggauuuuaucgaaggcguccacgggggaaccuggguuucugcgacgcuggagcaagacaaaugugugacagugauggcccccgauaagccuucccuggacauuagccucgagaccgucgcuaucgauagaccggccgaagugcgcaaaguuugcuacaacgcugugcugacacaugucaagauuaaugacaaaugucccucuaccggcgaggcccaccuugcggaagagaacgaaggcgacaaugccugcaagcggaccuauuccgauagaggguggggaaacggcugugggcuguucggaaagggcagcaucguggcuugcgccaaauuuacaugcgcuaagucuaugucccucuucgagguugaccagacgaaaauucaguacgugauccgcgcccagcugcacgucggggccaagcaagagaauuggaacaccgauaucaaaacacuuaaguuugacgcucugagcggaucccaggaaguggaguucauuggcuacggcaaagcgacccucgaaugucagguccagacagccguggauuuugggaacucuuauaucgcugagauggaaaccgagagcuggauuguugaccggcaaugggcccaggaucugacgcugccuuggcaguccggaagcggcgggguguggagagagaugcaucaccucgucgaguucgagcccccucaugccgcuacaauccgcgugcuggcccuuggaaaucaagaaggcucucugaagaccgcgcucaccggggcuaugcggguuacaaaggacaccaacgauaauaaccuguacaaacuucacggcggacacguguccugcagagucaagcugagcgcccucacacugaaaggcacgucuuauaagauuuguaccgacaaaauguuuuucgugaagaaucccacagauaccgggcauggaacagugguuaugcaggucaaggugagcaaaggcgccccgugccgcaucccugugaucgucgcugacgaccugaccgccgcuauuaacaaggggauccucgugacgguuaaucccauugccuccaccaacgaugacgaggugcugaucgaagucaauccucccuucggagauucuuacauuaucgugggccggggagacagcagacuuacauaucaguggcacaaagagggcuccagcaucggcagcacccuggggaaggccuucuccacaacgcucaaaggagcucagagacuggccgcgcuuggcgacaccgcuugggauuuugggucuaucggaggcguguucaacagcauugggcgggccguccaccaaguuuuuggaggcgccuuccgcacacuguuuggcgggauguccuggaucacccagggacucaugggcgcucugcuucuguggaugggggugaaugccagagaccggucuauugcucucgccuuccuggcgacaggaggcgugcuggucuuucucgccaccaacgugcaugcuugaggacuagucccuguucccagagcccacuuuuuuuucuuuuuuugaaauaaaauagccugucuuucagaucuaaaaaaaaaaaaaaaaaaaaaaaaaaaaaaaaaaaaaaaaaaaaaaaaaaaaaaaaaaaaaaaaugcaucccccccccccccccccccccccccccccccaaaggcucuuuucagagccaccagaauu

SEQ ID NO: 1678 - RNA, 2344 nt, Artificial Sequence
  mRNA product Design a-2 comprising derived and/or modified sequence from YFV__NC_002031.1__SSjev(V3)-prMEdelstem_TM-JEV (polyprotein: aa122-681) (opt5)
gggagaguccgcucagccagguugcagaagcggcuuagcguguguccuaaucuucucucugcguguagguaggccugugccgcaaacaagcuuaccaugaacgagggcagcaucauguggcuggccucccucgcuguggucauugccugcgcgggggcuguuacgcuggugcggaaaaaccgcuggcuucugcucaaugugaccagcgaggaucuggggaagacauuuuccgucggaaccggcaacugcacaaccaauauucuggaagccaaauacuggugucccgacucuauggaguauaacugcccuaaucucagcccgagagaagaacccgaugacaucgauuguuggugcuacgggguggaaaacguucggguggcuuauggaaagugugacuccgccggccgcucuagacggagccgcagagcgauugaucugccuacacaugagaaucacggccuuaaaacccggcaagagaaguggaugacggggcgcaugggagaaagacagcugcagaagaucgagcggugguucguccgcaaccccuuuuucgcugugaccgcccucacaauugccuaccugguuggcuccaauaugacccagagaguggucaucgcccuucuggugcucgcuguggggccugcuuauagcgcccauugcaucggaauuacagaccgggauuuuaucgaaggcguccacgggggaaccuggguuucugcgacgcuggagcaagacaaaugugugacagugauggcccccgauaagccuucccuggacauuagccucgagaccgucgcuaucgauagaccggccgaagugcgcaaaguuugcuacaacgcugugcugacacaugucaagauuaaugacaaaugucccucuaccggcgaggcccaccuugcggaagagaacgaaggcgacaaugccugcaagcggaccuauuccgauagaggguggggaaacggcugugggcuguucggaaagggcagcaucguggcuugcgccaaauuuacaugcgcuaagucuaugucccucuucgagguugaccagacgaaaauucaguacgugauccgcgcccagcugcacgucggggccaagcaagagaauuggaacaccgauaucaaaacacuuaaguuugacgcucugagcggaucccaggaaguggaguucauuggcuacggcaaagcgacccucgaaugucagguccagacagccguggauuuugggaacucuuauaucgcugagauggaaaccgagagcuggauuguugaccggcaaugggcccaggaucugacgcugccuuggcaguccggaagcggcgggguguggagagagaugcaucaccucgucgaguucgagcccccucaugccgcuacaauccgcgugcuggcccuuggaaaucaagaaggcucucugaagaccgcgcucaccggggcuaugcggguuacaaaggacaccaacgauaauaaccuguacaaacuucacggcggacacguguccugcagagucaagcugagcgcccucacacugaaaggcacgucuuauaagauuuguaccgacaaaauguuuuucgugaagaaucccacagauaccgggcauggaacagugguuaugcaggucaaggugagcaaaggcgccccgugccgcaucccugugaucgucgcugacgaccugaccgccgcuauuaacaaggggauccucgugacgguuaaucccauugccuccaccaacgaugacgaggugcugaucgaagucaauccucccuucggagauucuuacauuaucgugggccggggagacagcagacuuacauaucaguggcacaaagagggcuccagcaucggcagcacccuggggaaggccuucuccacaacgcucaaaggagcucagagacuggccgcgcuuggcgacaccgcuugggauuuugggucuaucggaggcguguucaacagcauugggcgggccguccaccaaguuuuuggaggcgccuuccgcacacuguuuggcgggauguccuggaucacccagggacucaugggcgcucugcuucuguggaugggggugaaugccagagaccggucuauugcucucgccuuccuggcgacaggaggcgugcuggucuuucucgccaccaacgugcaugcuugaggacuagucccuguucccagagcccacuuuuuuuucuuuuuuugaaauaaaauagccugucuuucagaucuaaaaaaaaaaaaaaaaaaaaaaaaaaaaaaaaaaaaaaaaaaaaaaaaaaaaaaaaaaaaaaaaugcaucccccccccccccccccccccccccccccccaaaggcucuuuucagagccaccagaauu

SEQ ID NO: 1679 - RNA, 2359 nt, Artificial Sequence
  mRNA product Design a-2 comprising derived and/or modified sequence from YFV__NC_002031.1__X-SS-prME (polyprotein: aa92-778) (opt5)
gggagaguccgcucagccagguugcagaagcggcuuagcguguguccuaaucuucucucugcguguagguaggccugugccgcaaacaagcuuaccaugagaggccugagcucccggaagcgcagaucucacgacgugcucaccguccaguuccugauccuugggaugcugcucaugacaggaggcguuacgcuggugcggaaaaaccgcuggcuucugcucaaugugaccagcgaggaucuggggaagacauuuuccgucggaaccggcaacugcacaaccaauauucuggaagccaaauacuggugucccgacucuauggaguauaacugcccuaaucucagcccgagagaagaacccgaugacaucgauuguuggugcuacgggguggaaaacguucggguggcuuauggaaagugugacuccgccggccgcucuagacggagccgcagagcgauugaucugccuacacaugagaaucacggccuuaaaacccggcaagagaaguggaugacggggcgcaugggagaaagacagcugcagaagaucgagcggugguucguccgcaaccccuuuuucgcugugaccgcccucacaauugccuaccugguuggcuccaauaugacccagagaguggucaucgcccuucuggugcucgcuguggggccugcuuauagcgcccauugcaucggaauuacagaccgggauuuuaucgaaggcguccacgggggaaccuggguuucugcgacgcuggagcaagacaaaugugugacagugauggcccccgauaagccuucccuggacauuagccucgagaccgucgcuaucgauagaccggccgaagugcgcaaaguuugcuacaacgcugugcugacacaugucaagauuaaugacaaaugucccucuaccggcgaggcccaccuugcggaagagaacgaaggcgacaaugccugcaagcggaccuauuccgauagaggguggggaaacggcugugggcuguucggaaagggcagcaucguggcuugcgccaaauuuacaugcgcuaagucuaugucccucuucgagguugaccagacgaaaauucaguacgugauccgcgcccagcugcacgucggggccaagcaagagaauuggaacaccgauaucaaaacacuuaaguuugacgcucugagcggaucccaggaaguggaguucauuggcuacggcaaagcgacccucgaaugucagguccagacagccguggauuuugggaacucuuauaucgcugagauggaaaccgagagcuggauuguugaccggcaaugggcccaggaucugacgcugccuuggcaguccggaagcggcgggguguggagagagaugcaucaccucgucgaguucgagcccccucaugccgcuacaauccgcgugcuggcccuuggaaaucaagaaggcucucugaagaccgcgcucaccggggcuaugcggguuacaaaggacaccaacgauaauaaccuguacaaacuucacggcggacacguguccugcagagucaagcugagcgcccucacacugaaaggcacgucuuauaagauuuguaccgacaaaauguuuuucgugaagaaucccacagauaccgggcauggaacagugguuaugcaggucaaggugagcaaaggcgccccgugccgcaucccugugaucgucgcugacgaccugaccgccgcuauuaacaaggggauccucgugacgguuaaucccauugccuccaccaacgaugacgaggugcugaucgaagucaauccucccuucggagauucuuacauuaucgugggccggggagacagcagacuuacauaucaguggcacaaagagggcuccagcaucggaaagcuguuuacccagacaaugaaaggcguugagcgccucgcggugaugggggauaccgccugggacuucucuuccgcuggaggcuuuuucacgagcgucgggaaggggauucauacaguguuuggcucugccuuccaagggcuguuuggcggacugaacuggaucaccaagguuauuaugggcgcugugcuuaucugggucgggauuaauacacggaacaugaccauguccaugagcaugauccucgugggagugauuaugauguuccugucccugggcgucggggccugaggacuagucccuguucccagagcccacuuuuuuuucuuuuuuugaaauaaaauagccugucuuucagaucuaaaaaaaaaaaaaaaaaaaaaaaaaaaaaaaaaaaaaaaaaaaaaaaaaaaaaaaaaaaaaaaaugcaucccccccccccccccccccccccccccccccaaaggcucuuuucagagccaccagaauu

SEQ ID NO: 1680 - RNA, 2362 nt, Artificial Sequence
  mRNA product Design a-2 comprising derived and/or modified sequence from YFV__NC_002031.1__SSjev(V3)-prME-XX (polyprotein: aa122-788) (opt5)
gggagaguccgcucagccagguugcagaagcggcuuagcguguguccuaaucuucucucugcguguagguaggccugugccgcaaacaagcuuaccaugaacgagggcagcaucauguggcuggccucccucgcuguggucauugccugcgcgggggcuguuacgcuggugcggaaaaaccgcuggcuucugcucaaugugaccagcgaggaucuggggaagacauuuuccgucggaaccggcaacugcacaaccaauauucuggaagccaaauacuggugucccgacucuauggaguauaacugcccuaaucucagcccgagagaagaacccgaugacaucgauuguuggugcuacgggguggaaaacguucggguggcuuauggaaagugugacuccgccggccgcucuagacggagccgcagagcgauugaucugccuacacaugagaaucacggccuuaaaacccggcaagagaaguggaugacggggcgcaugggagaaagacagcugcagaagaucgagcggugguucguccgcaaccccuuuuucgcugugaccgcccucacaauugccuaccugguuggcuccaauaugacccagagaguggucaucgcccuucuggugcucgcuguggggccugcuuauagcgcccauugcaucggaauuacagaccgggauuuuaucgaaggcguccacgggggaaccuggguuucugcgacgcuggagcaagacaaaugugugacagugauggcccccgauaagccuucccuggacauuagccucgagaccgucgcuaucgauagaccggccgaagugcgcaaaguuugcuacaacgcugugcugacacaugucaagauuaaugacaaaugucccucuaccggcgaggcccaccuugcggaagagaacgaaggcgacaaugccugcaagcggaccuauuccgauagaggguggggaaacggcugugggcuguucggaaagggcagcaucguggcuugcgccaaauuuacaugcgcuaagucuaugucccucuucgagguugaccagacgaaaauucaguacgugauccgcgcccagcugcacgucggggccaagcaagagaauuggaacaccgauaucaaaacacuuaaguuugacgcucugagcggaucccaggaaguggaguucauuggcuacggcaaagcgacccucgaaugucagguccagacagccguggauuuugggaacucuuauaucgcugagauggaaaccgagagcuggauuguugaccggcaaugggcccaggaucugacgcugccuuggcaguccggaagcggcgggguguggagagagaugcaucaccucgucgaguucgagcccccucaugccgcuacaauccgcgugcuggcccuuggaaaucaagaaggcucucugaagaccgcgcucaccggggcuaugcggguuacaaaggacaccaacgauaauaaccuguacaaacuucacggcggacacguguccugcagagucaagcugagcgcccucacacugaaaggcacgucuuauaagauuuguaccgacaaaauguuuuucgugaagaaucccacagauaccgggcauggaacagugguuaugcaggucaaggugagcaaaggcgccccgugccgcaucccugugaucgucgcugacgaccugaccgccgcuauuaacaaggggauccucgugacgguuaaucccauugccuccaccaacgaugacgaggugcugaucgaagucaauccucccuucggagauucuuacauuaucgugggccggggagacagcagacuuacauaucaguggcacaaagagggcuccagcaucggaaagcuguuuacccagacaaugaaaggcguugagcgccucgcggugaugggggauaccgccugggacuucucuuccgcuggaggcuuuuucacgagcgucgggaaggggauucauacaguguuuggcucugccuuccaagggcuguuuggcggacugaacuggaucaccaagguuauuaugggcgcugugcuuaucugggucgggauuaauacacggaacaugaccauguccaugagcaugauccucgugggagugauuaugauguuccugucccugggcgucggggccgaucagggaugugcgaucaauuuuggcaaaugaggacuagucccuguucccagagcccacuuuuuuuucuuuuuuugaaauaaaauagccugucuuucagaucuaaaaaaaaaaaaaaaaaaaaaaaaaaaaaaaaaaaaaaaaaaaaaaaaaaaaaaaaaaaaaaaaugcaucccccccccccccccccccccccccccccccaaaggcucuuuucagagccaccagaauu

SEQ ID NO: 1681 - RNA, 2371 nt, Artificial Sequence
  mRNA product Design a-2 comprising derived and/or modified sequence from YFV__NC_002031.1__X-SS-prMEdelstem_TM-JEV (polyprotein: aa92-681) (opt6)
gggagaguccgcucagccagguugcagaagcggcuuagcguguguccuaaucuucucucugcguguagguaggccugugccgcaaacaagcuuaccaugagaggauuaucaaguagaaaaagaagaucacaugauguacuaaccgugcaauuuuugaucuuagggaugcucuuaaugacaggagguguuacauuaguaagaaagaaucgauggcugcuuuuaaaugugacaucagaggauuuagggaaaacauuuucgguaggaacaggaaauuguacuacaaauauacuugaagcaaaauauuggugcccagacucuauggaauauaauuguccaaauuuaaguccuagagaagaaccugacgauauagauuguugguguuaugguguagaaaauguaagaguagcauacggcaaaugcgauagugcaggacguucuagacguucaaggagagccauagaucugcccacucacgaaaaucacggauugaaaacacgacaagaaaaauggaugacugggcgaaugggagaaagacaacuacagaaaauugaaagaugguucguuagaaauccauucuuugccguaacagcuuuaacaauagccuauuuaguagguaguaauaugacacaaagaguaguaauagcauugcuaguguuagcaguuggaccagcuuauagugcacauugcauaggaauaacagauagagacuuuauagaaggaguacacgggggaacuuggguaagugccacuuuagaacaagauaaauguguuacagugauggcgccagauaaaccaagucuggacauaaguuuggaaacaguagcgauugauagacccgcagaaguaagaaaaguuuguuauaaugcuguucuaacccauguuaaaauaaaugauaaaugcccuagcaccggagaagcccaucuagcagaagaaaaugaaggagauaacgcauguaaacgaacauacucagauagaggauggggcaacggauguggcuuguuuggaaaagguagcauaguagcaugcgcuaaauuuacaugcgcaaagucaaugucauuauuugaaguagaucaaacaaaaauacaauauguaauaagagcucaauuacacgugggugcaaaacaagaaaauuggaauacagacauaaagacacuaaaguucgacgcauuaaguggaucacaagagguagaauuuauaggguacggaaaagcgacuuuagagugucaaguccaaacagcaguagauuucgguaacucauacauagcagaaauggaaacugaaaguuggauaguagauagacaaugggcacaagacuugacacuaccuuggcaaucaggaagcggaggaguauggagagaaaugcaucauuuaguagaauuugaaccaccucaugcagcaacaauaagaguauuagcccuaggaaaccaagaaggaaguuuaaaaacagcacuaacaggagcuaugagaguaacaaaagauacaaaugacaacaaucuauacaaauuacacggaggacauguaagcugccggguaaaguugagcgcacuaacauuaaaaggaacgaguuauaaaauaugcacagauaaaauguucuuuguuaaaaauccuacagauaccggucauggaacaguaguaaugcaaguaaaaguaaguaaaggcgcucccuguagaauaccuguaauagucgcagacgauuuaaccgcagcaauaaauaaaggaauauuagucacgguaaacccaauagcgucaacaaaugaugaugaaguauuaauagaaguuaacccaccuuuuggagacaguuauauaauagucggaaggggugauaguagacuaacauaccaauggcauaaagaaggaagcucaauaggaaguacacuaggaaaagcauuuaguacaacauuaaaaggagcacaaagauuagcagcauuaggagauacagcaugggauuuuggaagcauaggaggaguauuuaauaguauagguagagcaguacaucaaguauuuggaggagcauuuagaacauuauuuggaggaaugaguuggauaacacaaggauuaaugggagcauuauuauuauggaugggaguaaaugcaagagauagaaguauagcauuagcauuuuuagcaacaggaggaguauuaguauuuuuagcaacaaauguacaugcaugaggacuagucccuguucccagagcccacuuuuuuuucuuuuuuugaaauaaaauagccugucuuucagaucuaaaaaaaaaaaaaaaaaaaaaaaaaaaaaaaaaaaaaaaaaaaaaaaaaaaaaaaaaaaaaaaaugcaucccccccccccccccccccccccccccccccaaaggcucuuuucagagccaccagaauu

SEQ ID NO: 1682 - RNA, 2344 nt, Artificial Sequence
  mRNA product Design a-2 comprising derived and/or modified sequence from YFV__NC_002031.1__SSjev(V3)-prMEdelstem_TM-JEV (polyprotein: aa122-681) (opt6)
gggagaguccgcucagccagguugcagaagcggcuuagcguguguccuaaucuucucucugcguguagguaggccugugccgcaaacaagcuuaccaugaaugaagguucaauuaugugguuggcaucauuagcaguuguaauugcaugugcuggugcaguuacauuaguaagaaagaaucgauggcugcuuuuaaaugugacaucagaggauuuagggaaaacauuuucgguaggaacaggaaauuguacuacaaauauacuugaagcaaaauauuggugcccagacucuauggaauauaauuguccaaauuuaaguccuagagaagaaccugacgauauagauuguugguguuaugguguagaaaauguaagaguagcauacggcaaaugcgauagugcaggacguucuagacguucaaggagagccauagaucugcccacucacgaaaaucacggauugaaaacacgacaagaaaaauggaugacugggcgaaugggagaaagacaacuacagaaaauugaaagaugguucguuagaaauccauucuuugccguaacagcuuuaacaauagccuauuuaguagguaguaauaugacacaaagaguaguaauagcauugcuaguguuagcaguuggaccagcuuauagugcacauugcauaggaauaacagauagagacuuuauagaaggaguacacgggggaacuuggguaagugccacuuuagaacaagauaaauguguuacagugauggcgccagauaaaccaagucuggacauaaguuuggaaacaguagcgauugauagacccgcagaaguaagaaaaguuuguuauaaugcuguucuaacccauguuaaaauaaaugauaaaugcccuagcaccggagaagcccaucuagcagaagaaaaugaaggagauaacgcauguaaacgaacauacucagauagaggauggggcaacggauguggcuuguuuggaaaagguagcauaguagcaugcgcuaaauuuacaugcgcaaagucaaugucauuauuugaaguagaucaaacaaaaauacaauauguaauaagagcucaauuacacgugggugcaaaacaagaaaauuggaauacagacauaaagacacuaaaguucgacgcauuaaguggaucacaagagguagaauuuauaggguacggaaaagcgacuuuagagugucaaguccaaacagcaguagauuucgguaacucauacauagcagaaauggaaacugaaaguuggauaguagauagacaaugggcacaagacuugacacuaccuuggcaaucaggaagcggaggaguauggagagaaaugcaucauuuaguagaauuugaaccaccucaugcagcaacaauaagaguauuagcccuaggaaaccaagaaggaaguuuaaaaacagcacuaacaggagcuaugagaguaacaaaagauacaaaugacaacaaucuauacaaauuacacggaggacauguaagcugccggguaaaguugagcgcacuaacauuaaaaggaacgaguuauaaaauaugcacagauaaaauguucuuuguuaaaaauccuacagauaccggucauggaacaguaguaaugcaaguaaaaguaaguaaaggcgcucccuguagaauaccuguaauagucgcagacgauuuaaccgcagcaauaaauaaaggaauauuagucacgguaaacccaauagcgucaacaaaugaugaugaaguauuaauagaaguuaacccaccuuuuggagacaguuauauaauagucggaaggggugauaguagacuaacauaccaauggcauaaagaaggaagcucaauaggaaguacacuaggaaaagcauuuaguacaacauuaaaaggagcacaaagauuagcagcauuaggagauacagcaugggauuuuggaagcauaggaggaguauuuaauaguauagguagagcaguacaucaaguauuuggaggagcauuuagaacauuauuuggaggaaugaguuggauaacacaaggauuaaugggagcauuauuauuauggaugggaguaaaugcaagagauagaaguauagcauuagcauuuuuagcaacaggaggaguauuaguauuuuuagcaacaaauguacaugcaugaggacuagucccuguucccagagcccacuuuuuuuucuuuuuuugaaauaaaauagccugucuuucagaucuaaaaaaaaaaaaaaaaaaaaaaaaaaaaaaaaaaaaaaaaaaaaaaaaaaaaaaaaaaaaaaaaugcaucccccccccccccccccccccccccccccccaaaggcucuuuucagagccaccagaauu

SEQ ID NO: 1683 - RNA, 2359 nt, Artificial Sequence
  mRNA product Design a-2 comprising derived and/or modified sequence from YFV__NC_002031.1__X-SS-prME (polyprotein: aa92-778) (opt6)
gggagaguccgcucagccagguugcagaagcggcuuagcguguguccuaaucuucucucugcguguagguaggccugugccgcaaacaagcuuaccaugagaggauuaucaaguagaaaaagaagaucacaugauguacuaaccgugcaauuuuugaucuuagggaugcucuuaaugacaggagguguuacauuaguaagaaagaaucgauggcugcuuuuaaaugugacaucagaggauuuagggaaaacauuuucgguaggaacaggaaauuguacuacaaauauacuugaagcaaaauauuggugcccagacucuauggaauauaauuguccaaauuuaaguccuagagaagaaccugacgauauagauuguugguguuaugguguagaaaauguaagaguagcauacggcaaaugcgauagugcaggacguucuagacguucaaggagagccauagaucugcccacucacgaaaaucacggauugaaaacacgacaagaaaaauggaugacugggcgaaugggagaaagacaacuacagaaaauugaaagaugguucguuagaaauccauucuuugccguaacagcuuuaacaauagccuauuuaguagguaguaauaugacacaaagaguaguaauagcauugcuaguguuagcaguuggaccagcuuauagugcacauugcauaggaauaacagauagagacuuuauagaaggaguacacgggggaacuuggguaagugccacuuuagaacaagauaaauguguuacagugauggcgccagauaaaccaagucuggacauaaguuuggaaacaguagcgauugauagacccgcagaaguaagaaaaguuuguuauaaugcuguucuaacccauguuaaaauaaaugauaaaugcccuagcaccggagaagcccaucuagcagaagaaaaugaaggagauaacgcauguaaacgaacauacucagauagaggauggggcaacggauguggcuuguuuggaaaagguagcauaguagcaugcgcuaaauuuacaugcgcaaagucaaugucauuauuugaaguagaucaaacaaaaauacaauauguaauaagagcucaauuacacgugggugcaaaacaagaaaauuggaauacagacauaaagacacuaaaguucgacgcauuaaguggaucacaagagguagaauuuauaggguacggaaaagcgacuuuagagugucaaguccaaacagcaguagauuucgguaacucauacauagcagaaauggaaacugaaaguuggauaguagauagacaaugggcacaagacuugacacuaccuuggcaaucaggaagcggaggaguauggagagaaaugcaucauuuaguagaauuugaaccaccucaugcagcaacaauaagaguauuagcccuaggaaaccaagaaggaaguuuaaaaacagcacuaacaggagcuaugagaguaacaaaagauacaaaugacaacaaucuauacaaauuacacggaggacauguaagcugccggguaaaguugagcgcacuaacauuaaaaggaacgaguuauaaaauaugcacagauaaaauguucuuuguuaaaaauccuacagauaccggucauggaacaguaguaaugcaaguaaaaguaaguaaaggcgcucccuguagaauaccuguaauagucgcagacgauuuaaccgcagcaauaaauaaaggaauauuagucacgguaaacccaauagcgucaacaaaugaugaugaaguauuaauagaaguuaacccaccuuuuggagacaguuauauaauagucggaaggggugauaguagacuaacauaccaauggcauaaagaaggaagcucaauaggaaaauuauuuacucaaaccaugaaagguguagaaaggcuagcuguuaugggugacacagcaugggauuuuucaagcgcaggaggguucuuuacaucaguagguaaaggaauacauacaguauuuggaagugcauuucaaggauuauuuggugguuuaaauuggauaacaaaaguaauaaugggcgcaguuuuaauauggguagguauaaacacaagaaauaugacaaugucuaugaguaugauauuggucggaguaauaaugauguuuuuaucacuaggagugggugcaugaggacuagucccuguucccagagcccacuuuuuuuucuuuuuuugaaauaaaauagccugucuuucagaucuaaaaaaaaaaaaaaaaaaaaaaaaaaaaaaaaaaaaaaaaaaaaaaaaaaaaaaaaaaaaaaaaugcaucccccccccccccccccccccccccccccccaaaggcucuuuucagagccaccagaauu

SEQ ID NO: 1684 - RNA, 2362 nt, Artificial Sequence
  mRNA product Design a-2 comprising derived and/or modified sequence from YFV__NC_002031.1__SSjev(V3)-prME-XX (polyprotein: aa122-788) (opt6)
gggagaguccgcucagccagguugcagaagcggcuuagcguguguccuaaucuucucucugcguguagguaggccugugccgcaaacaagcuuaccaugaaugaagguucaauuaugugguuggcaucauuagcaguuguaauugcaugugcuggugcaguuacauuaguaagaaagaaucgauggcugcuuuuaaaugugacaucagaggauuuagggaaaacauuuucgguaggaacaggaaauuguacuacaaauauacuugaagcaaaauauuggugcccagacucuauggaauauaauuguccaaauuuaaguccuagagaagaaccugacgauauagauuguugguguuaugguguagaaaauguaagaguagcauacggcaaaugcgauagugcaggacguucuagacguucaaggagagccauagaucugcccacucacgaaaaucacggauugaaaacacgacaagaaaaauggaugacugggcgaaugggagaaagacaacuacagaaaauugaaagaugguucguuagaaauccauucuuugccguaacagcuuuaacaauagccuauuuaguagguaguaauaugacacaaagaguaguaauagcauugcuaguguuagcaguuggaccagcuuauagugcacauugcauaggaauaacagauagagacuuuauagaaggaguacacgggggaacuuggguaagugccacuuuagaacaagauaaauguguuacagugauggcgccagauaaaccaagucuggacauaaguuuggaaacaguagcgauugauagacccgcagaaguaagaaaaguuuguuauaaugcuguucuaacccauguuaaaauaaaugauaaaugcccuagcaccggagaagcccaucuagcagaagaaaaugaaggagauaacgcauguaaacgaacauacucagauagaggauggggcaacggauguggcuuguuuggaaaagguagcauaguagcaugcgcuaaauuuacaugcgcaaagucaaugucauuauuugaaguagaucaaacaaaaauacaauauguaauaagagcucaauuacacgugggugcaaaacaagaaaauuggaauacagacauaaagacacuaaaguucgacgcauuaaguggaucacaagagguagaauuuauaggguacggaaaagcgacuuuagagugucaaguccaaacagcaguagauuucgguaacucauacauagcagaaauggaaacugaaaguuggauaguagauagacaaugggcacaagacuugacacuaccuuggcaaucaggaagcggaggaguauggagagaaaugcaucauuuaguagaauuugaaccaccucaugcagcaacaauaagaguauuagcccuaggaaaccaagaaggaaguuuaaaaacagcacuaacaggagcuaugagaguaacaaaagauacaaaugacaacaaucuauacaaauuacacggaggacauguaagcugccggguaaaguugagcgcacuaacauuaaaaggaacgaguuauaaaauaugcacagauaaaauguucuuuguuaaaaauccuacagauaccggucauggaacaguaguaaugcaaguaaaaguaaguaaaggcgcucccuguagaauaccuguaauagucgcagacgauuuaaccgcagcaauaaauaaaggaauauuagucacgguaaacccaauagcgucaacaaaugaugaugaaguauuaauagaaguuaacccaccuuuuggagacaguuauauaauagucggaaggggugauaguagacuaacauaccaauggcauaaagaaggaagcucaauaggaaaauuauuuacucaaaccaugaaagguguagaaaggcuagcuguuaugggugacacagcaugggauuuuucaagcgcaggaggguucuuuacaucaguagguaaaggaauacauacaguauuuggaagugcauuucaaggauuauuuggugguuuaaauuggauaacaaaaguaauaaugggcgcaguuuuaauauggguagguauaaacacaagaaauaugacaaugucuaugaguaugauauuggucggaguaauaaugauguuuuuaucacuaggagugggugcagaucaagguugcgcuauuaauuuuggaaaaugaggacuagucccuguucccagagcccacuuuuuuuucuuuuuuugaaauaaaauagccugucuuucagaucuaaaaaaaaaaaaaaaaaaaaaaaaaaaaaaaaaaaaaaaaaaaaaaaaaaaaaaaaaaaaaaaaugcaucccccccccccccccccccccccccccccccaaaggcucuuuucagagccaccagaauu

SEQ ID NO: 1685 - RNA, 2371 nt, Artificial Sequence
  mRNA product Design a-2 comprising derived and/or modified sequence from YFV__NC_002031.1__X-SS-prMEdelstem_TM-JEV (polyprotein: aa92-681) (opt11)
gggagaguccgcucagccagguugcagaagcggcuuagcguguguccuaaucuucucucugcguguagguaggccugugccgcaaacaagcuuaccaugcggggacuaagcagcagaaaaagacgcagccacgaugugcucaccgugcaauuccucauacuggggaugcuccuaaugaccggaggcgugacccuaguaaggaaaaacagauggcuacuacuaaacguaaccucagaagaucuaggaaagacauuuucagucggcacaggcaacugcacaaccaacauacuagaagcaaaauauuggugcccagacagcauggaauacaacugucccaaccucagcccaagagaggaaccagacgacauagacugcugguguuacggaguagaaaacguaagaguggcauacggcaaaugcgacagcgcaggcaggagccgaagaucccgcagagccaucgacuugcccacgcacgaaaaccacggccucaaaacacgacaagaaaaauggaugacagggcgaaugggagaacgacagcuccagaaaauagaacgaugguucguccggaacccguucuucgcaguaacggcacuaacaaucgcauaccucguaggcagcaacaugacacaaagaguggucaucgcgcuacucguacuagcaguggggcccgcauacagugcacacugcauaggaaucacagaccgugacuucaucgaaggcguacacggaggaacguggguaagcgcgacacuggaacaagacaaaugcgugacaguaauggcaccagacaaaccaagccuagacauaucccuagaaacggucgccaucgaccgucccgcagaaguacgaaagguaugcuauaaugcaguccucacacacgucaaaauaaacgacaaaugccccagcacgggcgaagcacaccucgccgaagaaaacgaaggggauaacgcgugcaaacgcaccuacuccgacaggggauggggcaacggaugcggacuguucggaaaaggauccauagucgcaugcgcaaaauuuaccugcgcaaaaagcaugagcuuguucgagguagaccaaacgaagauccaauacguaauccgagcucaacuacacguuggggccaagcaagagaacuggaauacggacaucaaaacacuaaaauucgacgcacucuccggcucacaagaagucgaguucaucggcuacggcaaagcaacacuagaaugccaaguacaaacagcgguggacuucggcaacagcuacauagcagaaauggaaacagaaagcuggauaguagaccgacaaugggcacaagaccuaacucugccauggcaaagcggcucaggaggaguguggagagagaugcaccaccugguagaguucgaacccccacacgcagcaacaauaaggguacuggcacuaggcaaccaagaaggcagccuaaaaaccgcacucacaggagccaugcgcgugacgaaggacaccaacgacaacaaccucuacaaacuccacggagggcacguauccugccgcguaaaacuaucagcacuaacgcuaaaaggaacaagcuacaaaauaugcacagacaaaauguucuucgucaaaaaccccacagacacaggccacggcacagucguaaugcaagugaaggucagcaagggggcccccugccgaaucccagucauaguggcagacgaccucacggccgccaucaacaaagggauccugguaacagugaacccaauagcaucgaccaacgacgacgaaguccucauagaagugaaucccccguucggcgacagcuacaucaucguaggacgcggcgacucccgacugacguaccaauggcauaaagaaggcagcagcauugggagcacgcucgggaaagcguucucgaccacgcucaagggcgcgcaaaggcucgcggccuugggcgauaccgcgugggauuucgggagcauaggcggggucuuuaacucgaucgggcgcgcgguccaucaaguguucgggggcgcguucaggaccuuguucgggggcaugagcuggaucacgcaagggcucaugggcgcgcucuugcucuggaugggggucaaugccagggacaggagcauagccuuggccuuucucgcgaccgggggcgugcucguguucuuggccacgaacgugcacgcgugaggacuagucccuguucccagagcccacuuuuuuuucuuuuuuugaaauaaaauagccugucuuucagaucuaaaaaaaaaaaaaaaaaaaaaaaaaaaaaaaaaaaaaaaaaaaaaaaaaaaaaaaaaaaaaaaaugcaucccccccccccccccccccccccccccccccaaaggcucuuuucagagccaccagaauu

SEQ ID NO: 1686 - RNA, 2344 nt, Artificial Sequence
  mRNA product Design a-2 comprising derived and/or modified sequence from YFV__NC_002031.1__SSjev(V3)-prMEdelstem_TM-JEV (polyprotein: aa122-681) (opt11)
gggagaguccgcucagccagguugcagaagcggcuuagcguguguccuaaucuucucucugcguguagguaggccugugccgcaaacaagcuuaccaugaacgagggcucgaucaugugguuggccucgcucgcggucgugaucgcgugcgcgggcgcggugacccuaguaaggaaaaacagauggcuacuacuaaacguaaccucagaagaucuaggaaagacauuuucagucggcacaggcaacugcacaaccaacauacuagaagcaaaauauuggugcccagacagcauggaauacaacugucccaaccucagcccaagagaggaaccagacgacauagacugcugguguuacggaguagaaaacguaagaguggcauacggcaaaugcgacagcgcaggcaggagccgaagaucccgcagagccaucgacuugcccacgcacgaaaaccacggccucaaaacacgacaagaaaaauggaugacagggcgaaugggagaacgacagcuccagaaaauagaacgaugguucguccggaacccguucuucgcaguaacggcacuaacaaucgcauaccucguaggcagcaacaugacacaaagaguggucaucgcgcuacucguacuagcaguggggcccgcauacagugcacacugcauaggaaucacagaccgugacuucaucgaaggcguacacggaggaacguggguaagcgcgacacuggaacaagacaaaugcgugacaguaauggcaccagacaaaccaagccuagacauaucccuagaaacggucgccaucgaccgucccgcagaaguacgaaagguaugcuauaaugcaguccucacacacgucaaaauaaacgacaaaugccccagcacgggcgaagcacaccucgccgaagaaaacgaaggggauaacgcgugcaaacgcaccuacuccgacaggggauggggcaacggaugcggacuguucggaaaaggauccauagucgcaugcgcaaaauuuaccugcgcaaaaagcaugagcuuguucgagguagaccaaacgaagauccaauacguaauccgagcucaacuacacguuggggccaagcaagagaacuggaauacggacaucaaaacacuaaaauucgacgcacucuccggcucacaagaagucgaguucaucggcuacggcaaagcaacacuagaaugccaaguacaaacagcgguggacuucggcaacagcuacauagcagaaauggaaacagaaagcuggauaguagaccgacaaugggcacaagaccuaacucugccauggcaaagcggcucaggaggaguguggagagagaugcaccaccugguagaguucgaacccccacacgcagcaacaauaaggguacuggcacuaggcaaccaagaaggcagccuaaaaaccgcacucacaggagccaugcgcgugacgaaggacaccaacgacaacaaccucuacaaacuccacggagggcacguauccugccgcguaaaacuaucagcacuaacgcuaaaaggaacaagcuacaaaauaugcacagacaaaauguucuucgucaaaaaccccacagacacaggccacggcacagucguaaugcaagugaaggucagcaagggggcccccugccgaaucccagucauaguggcagacgaccucacggccgccaucaacaaagggauccugguaacagugaacccaauagcaucgaccaacgacgacgaaguccucauagaagugaaucccccguucggcgacagcuacaucaucguaggacgcggcgacucccgacugacguaccaauggcauaaagaaggcagcagcauugggagcacgcucgggaaagcguucucgaccacgcucaagggcgcgcaaaggcucgcggccuugggcgauaccgcgugggauuucgggagcauaggcggggucuuuaacucgaucgggcgcgcgguccaucaaguguucgggggcgcguucaggaccuuguucgggggcaugagcuggaucacgcaagggcucaugggcgcgcucuugcucuggaugggggucaaugccagggacaggagcauagccuuggccuuucucgcgaccgggggcgugcucguguucuuggccacgaacgugcacgcgugaggacuagucccuguucccagagcccacuuuuuuuucuuuuuuugaaauaaaauagccugucuuucagaucuaaaaaaaaaaaaaaaaaaaaaaaaaaaaaaaaaaaaaaaaaaaaaaaaaaaaaaaaaaaaaaaaugcaucccccccccccccccccccccccccccccccaaaggcucuuuucagagccaccagaauu

SEQ ID NO: 1687 - RNA, 2359 nt, Artificial Sequence
  mRNA product Design a-2 comprising derived and/or modified sequence from YFV__NC_002031.1__X-SS-prME (polyprotein: aa92-778) (opt11)
gggagaguccgcucagccagguugcagaagcggcuuagcguguguccuaaucuucucucugcguguagguaggccugugccgcaaacaagcuuaccaugcggggacuaagcagcagaaaaagacgcagccacgaugugcucaccgugcaauuccucauacuggggaugcuccuaaugaccggaggcgugacccuaguaaggaaaaacagauggcuacuacuaaacguaaccucagaagaucuaggaaagacauuuucagucggcacaggcaacugcacaaccaacauacuagaagcaaaauauuggugcccagacagcauggaauacaacugucccaaccucagcccaagagaggaaccagacgacauagacugcugguguuacggaguagaaaacguaagaguggcauacggcaaaugcgacagcgcaggcaggagccgaagaucccgcagagccaucgacuugcccacgcacgaaaaccacggccucaaaacacgacaagaaaaauggaugacagggcgaaugggagaacgacagcuccagaaaauagaacgaugguucguccggaacccguucuucgcaguaacggcacuaacaaucgcauaccucguaggcagcaacaugacacaaagaguggucaucgcgcuacucguacuagcaguggggcccgcauacagugcacacugcauaggaaucacagaccgugacuucaucgaaggcguacacggaggaacguggguaagcgcgacacuggaacaagacaaaugcgugacaguaauggcaccagacaaaccaagccuagacauaucccuagaaacggucgccaucgaccgucccgcagaaguacgaaagguaugcuauaaugcaguccucacacacgucaaaauaaacgacaaaugccccagcacgggcgaagcacaccucgccgaagaaaacgaaggggauaacgcgugcaaacgcaccuacuccgacaggggauggggcaacggaugcggacuguucggaaaaggauccauagucgcaugcgcaaaauuuaccugcgcaaaaagcaugagcuuguucgagguagaccaaacgaagauccaauacguaauccgagcucaacuacacguuggggccaagcaagagaacuggaauacggacaucaaaacacuaaaauucgacgcacucuccggcucacaagaagucgaguucaucggcuacggcaaagcaacacuagaaugccaaguacaaacagcgguggacuucggcaacagcuacauagcagaaauggaaacagaaagcuggauaguagaccgacaaugggcacaagaccuaacucugccauggcaaagcggcucaggaggaguguggagagagaugcaccaccugguagaguucgaacccccacacgcagcaacaauaaggguacuggcacuaggcaaccaagaaggcagccuaaaaaccgcacucacaggagccaugcgcgugacgaaggacaccaacgacaacaaccucuacaaacuccacggagggcacguauccugccgcguaaaacuaucagcacuaacgcuaaaaggaacaagcuacaaaauaugcacagacaaaauguucuucgucaaaaaccccacagacacaggccacggcacagucguaaugcaagugaaggucagcaagggggcccccugccgaaucccagucauaguggcagacgaccucacggccgccaucaacaaagggauccugguaacagugaacccaauagcaucgaccaacgacgacgaaguccucauagaagugaaucccccguucggcgacagcuacaucaucguaggacgcggcgacucccgacugacguaccaauggcauaaagaaggcagcagcauuggaaaacuauucacccaaaccaugaagggcgucgaaagacucgcggugaugggagacaccgcaugggacuucucgagcgcaggcggcuucuucacaagcguaggaaaagggauucacacaguauucggauccgcauuccaaggccucuucgggggacuaaacuggauaacgaaaguaauaaugggagcaguucucauauggguaggaaucaacacacgaaacaugacaauguccaugucaaugauacucguaggcguaaucaugauguuucugucacucggagugggagcaugaggacuagucccuguucccagagcccacuuuuuuuucuuuuuuugaaauaaaauagccugucuuucagaucuaaaaaaaaaaaaaaaaaaaaaaaaaaaaaaaaaaaaaaaaaaaaaaaaaaaaaaaaaaaaaaaaugcaucccccccccccccccccccccccccccccccaaaggcucuuuucagagccaccagaauu

SEQ ID NO: 1688 - RNA, 2362 nt, Artificial Sequence
  mRNA product Design a-2 comprising derived and/or modified sequence from YFV__NC_002031.1__SSjev(V3)-prME-XX (polyprotein: aa122-788) (opt11)
gggagaguccgcucagccagguugcagaagcggcuuagcguguguccuaaucuucucucugcguguagguaggccugugccgcaaacaagcuuaccaugaacgagggcucgaucaugugguuggccucgcucgcggucgugaucgcgugcgcgggcgcggugacccuaguaaggaaaaacagauggcuacuacuaaacguaaccucagaagaucuaggaaagacauuuucagucggcacaggcaacugcacaaccaacauacuagaagcaaaauauuggugcccagacagcauggaauacaacugucccaaccucagcccaagagaggaaccagacgacauagacugcugguguuacggaguagaaaacguaagaguggcauacggcaaaugcgacagcgcaggcaggagccgaagaucccgcagagccaucgacuugcccacgcacgaaaaccacggccucaaaacacgacaagaaaaauggaugacagggcgaaugggagaacgacagcuccagaaaauagaacgaugguucguccggaacccguucuucgcaguaacggcacuaacaaucgcauaccucguaggcagcaacaugacacaaagaguggucaucgcgcuacucguacuagcaguggggcccgcauacagugcacacugcauaggaaucacagaccgugacuucaucgaaggcguacacggaggaacguggguaagcgcgacacuggaacaagacaaaugcgugacaguaauggcaccagacaaaccaagccuagacauaucccuagaaacggucgccaucgaccgucccgcagaaguacgaaagguaugcuauaaugcaguccucacacacgucaaaauaaacgacaaaugccccagcacgggcgaagcacaccucgccgaagaaaacgaaggggauaacgcgugcaaacgcaccuacuccgacaggggauggggcaacggaugcggacuguucggaaaaggauccauagucgcaugcgcaaaauuuaccugcgcaaaaagcaugagcuuguucgagguagaccaaacgaagauccaauacguaauccgagcucaacuacacguuggggccaagcaagagaacuggaauacggacaucaaaacacuaaaauucgacgcacucuccggcucacaagaagucgaguucaucggcuacggcaaagcaacacuagaaugccaaguacaaacagcgguggacuucggcaacagcuacauagcagaaauggaaacagaaagcuggauaguagaccgacaaugggcacaagaccuaacucugccauggcaaagcggcucaggaggaguguggagagagaugcaccaccugguagaguucgaacccccacacgcagcaacaauaaggguacuggcacuaggcaaccaagaaggcagccuaaaaaccgcacucacaggagccaugcgcgugacgaaggacaccaacgacaacaaccucuacaaacuccacggagggcacguauccugccgcguaaaacuaucagcacuaacgcuaaaaggaacaagcuacaaaauaugcacagacaaaauguucuucgucaaaaaccccacagacacaggccacggcacagucguaaugcaagugaaggucagcaagggggcccccugccgaaucccagucauaguggcagacgaccucacggccgccaucaacaaagggauccugguaacagugaacccaauagcaucgaccaacgacgacgaaguccucauagaagugaaucccccguucggcgacagcuacaucaucguaggacgcggcgacucccgacugacguaccaauggcauaaagaaggcagcagcauuggaaaacuauucacccaaaccaugaagggcgucgaaagacucgcggugaugggagacaccgcaugggacuucucgagcgcaggcggcuucuucacaagcguaggaaaagggauucacacaguauucggauccgcauuccaaggccucuucgggggacuaaacuggauaacgaaaguaauaaugggagcaguucucauauggguaggaaucaacacacgaaacaugacaauguccaugucaaugauacucguaggcguaaucaugauguuucugucacucggagugggagcagaccaagguugcgccauaaacuucggcaagugaggacuagucccuguucccagagcccacuuuuuuuucuuuuuuugaaauaaaauagccugucuuucagaucuaaaaaaaaaaaaaaaaaaaaaaaaaaaaaaaaaaaaaaaaaaaaaaaaaaaaaaaaaaaaaaaaugcaucccccccccccccccccccccccccccccccaaaggcucuuuucagagccaccagaauu

SEQ ID NO: 1689 - RNA, 2416 nt, Artificial Sequence
  mRNA product Design b-4 comprising derived and/or modified sequence from YFV__NC_002031.1__X-SS-prMEdelstem_TM-JEV (polyprotein: aa92-681) (wt)
gggagagucccgcagucggcguccagcggcucugcuuguucgugugugugucguugcaggccuuauucaagcuuaccaugagaggauuguccucaaggaaacgccguucccaugauguucugacugugcaauuccuaauuuugggaaugcuguugaugacggguggagugaccuuggugcggaaaaacagaugguugcuccuaaaugugacaucugaggaccucgggaaaacauucucugugggcacaggcaacugcacaacaaacauuuuggaagccaaguacuggugcccagacucaauggaauacaacugucccaaucucaguccaagagaggagccagaugacauugauugcuggugcuaugggguggaaaacguuagagucgcauaugguaagugugacucagcaggcaggucuaggaggucaagaagggccauugacuugccuacgcaugaaaaccaugguuugaagacccggcaagaaaaauggaugacuggaagaaugggugaaaggcaacuccaaaagauugagagaugguucgugaggaaccccuuuuuugcagugacggcucugaccauugccuaccuugugggaagcaacaugacgcaacgagucgugauugcccuacuggucuuggcuguugguccggccuacucagcucacugcauuggaauuacugacagggauuucauugagggggugcauggaggaacuuggguuucagcuacccuggagcaagacaagugugucacuguuauggccccugacaagccuucauuggacaucucacuagagacaguagccauugauagaccugcugaggugaggaaaguguguuacaaugcaguucucacucaugugaagauuaaugacaagugccccagcacuggagaggcccaccuagcugaagagaacgaaggggacaaugcgugcaagcgcacuuauucugauagaggcuggggcaauggcuguggccuauuugggaaagggagcauuguggcaugcgccaaauucacuugugccaaauccaugaguuuguuugagguugaucagaccaaaauucaguaugucaucagagcacaauugcauguaggggccaagcaggaaaauuggaauaccgacauuaagacucucaaguuugaugcccugucaggcucccaggaagucgaguucauuggguauggaaaagcuacacuggaaugccaggugcaaacugcgguggacuuugguaacaguuacaucgcugagauggaaacagagagcuggauaguggacagacagugggcccaggacuugacccugccauggcagaguggaaguggcgggguguggagagagaugcaucaucuugucgaauuugaaccuccgcaugccgccacuaucagaguacuggcccugggaaaccaggaaggcuccuugaaaacagcucuuacuggcgcaaugaggguuacaaaggacacaaaugacaacaaccuuuacaaacuacaugguggacauguuucuugcagagugaaauugucagcuuugacacucaaggggacauccuacaaaauaugcacugacaaaauguuuuuugucaagaacccaacugacacuggccauggcacuguugugaugcaggugaaagugucaaaaggagcccccugcaggauuccagugauaguagcugaugaucuuacagcggcaaucaauaaaggcauuuugguuacaguuaaccccaucgccucaaccaaugaugaugaagugcugauugaggugaacccaccuuuuggagacagcuacauuaucguugggagaggagauucacgucucacuuaccaguggcacaaagagggaagcucaauaggcagcacgcugggcaaggccuuuucaacaacuuugaagggagcucaaagacuggcagcguugggcgacacagccugggacuuuggcucuauuggaggggucuucaacuccauaggaagagccguucaccaaguguuugguggugccuucagaacacucuuugggggaaugucuuggaucacacaagggcuaaugggugcccuacugcucuggaugggcgucaacgcacgagaccgaucaauugcuuuggccuucuuagccacaggaggugugcucguguucuuagcgaccaaugugcacgccuaaggacuaguaauaaggaaacuguaugaaugucugugggcaggaagugaagagauccuucuguaaagguuuuuggaauuaugucugcugaauaauaaacuuuuuugaaauaauaaaucugguagaaaaaugagaucuaaaaaaaaaaaaaaaaaaaaaaaaaaaaaaaaaaaaaaaaaaaaaaaaaaaaaaaaaaaaaaaaugcaucccccccccccccccccccccccccccccccaaaggcucuuuucagagccaccagaauu

SEQ ID NO: 1690 - RNA, 2389 nt, Artificial Sequence
  mRNA product Design b-4 comprising derived and/or modified sequence from YFV__NC_002031.1__SSjev(V3)-prMEdelstem_TM-JEV (polyprotein: aa122-681) (wt)
gggagagucccgcagucggcguccagcggcucugcuuguucgugugugugucguugcaggccuuauucaagcuuaccaugaaugaaggcucaaucauguggcucgcgagcuuggcaguugucauagcuugugcaggagccgugaccuuggugcggaaaaacagaugguugcuccuaaaugugacaucugaggaccucgggaaaacauucucugugggcacaggcaacugcacaacaaacauuuuggaagccaaguacuggugcccagacucaauggaauacaacugucccaaucucaguccaagagaggagccagaugacauugauugcuggugcuaugggguggaaaacguuagagucgcauaugguaagugugacucagcaggcaggucuaggaggucaagaagggccauugacuugccuacgcaugaaaaccaugguuugaagacccggcaagaaaaauggaugacuggaagaaugggugaaaggcaacuccaaaagauugagagaugguucgugaggaaccccuuuuuugcagugacggcucugaccauugccuaccuugugggaagcaacaugacgcaacgagucgugauugcccuacuggucuuggcuguugguccggccuacucagcucacugcauuggaauuacugacagggauuucauugagggggugcauggaggaacuuggguuucagcuacccuggagcaagacaagugugucacuguuauggccccugacaagccuucauuggacaucucacuagagacaguagccauugauagaccugcugaggugaggaaaguguguuacaaugcaguucucacucaugugaagauuaaugacaagugccccagcacuggagaggcccaccuagcugaagagaacgaaggggacaaugcgugcaagcgcacuuauucugauagaggcuggggcaauggcuguggccuauuugggaaagggagcauuguggcaugcgccaaauucacuugugccaaauccaugaguuuguuugagguugaucagaccaaaauucaguaugucaucagagcacaauugcauguaggggccaagcaggaaaauuggaauaccgacauuaagacucucaaguuugaugcccugucaggcucccaggaagucgaguucauuggguauggaaaagcuacacuggaaugccaggugcaaacugcgguggacuuugguaacaguuacaucgcugagauggaaacagagagcuggauaguggacagacagugggcccaggacuugacccugccauggcagaguggaaguggcgggguguggagagagaugcaucaucuugucgaauuugaaccuccgcaugccgccacuaucagaguacuggcccugggaaaccaggaaggcuccuugaaaacagcucuuacuggcgcaaugaggguuacaaaggacacaaaugacaacaaccuuuacaaacuacaugguggacauguuucuugcagagugaaauugucagcuuugacacucaaggggacauccuacaaaauaugcacugacaaaauguuuuuugucaagaacccaacugacacuggccauggcacuguugugaugcaggugaaagugucaaaaggagcccccugcaggauuccagugauaguagcugaugaucuuacagcggcaaucaauaaaggcauuuugguuacaguuaaccccaucgccucaaccaaugaugaugaagugcugauugaggugaacccaccuuuuggagacagcuacauuaucguugggagaggagauucacgucucacuuaccaguggcacaaagagggaagcucaauaggcagcacgcugggcaaggccuuuucaacaacuuugaagggagcucaaagacuggcagcguugggcgacacagccugggacuuuggcucuauuggaggggucuucaacuccauaggaagagccguucaccaaguguuugguggugccuucagaacacucuuugggggaaugucuuggaucacacaagggcuaaugggugcccuacugcucuggaugggcgucaacgcacgagaccgaucaauugcuuuggccuucuuagccacaggaggugugcucguguucuuagcgaccaaugugcacgccuaaggacuaguaauaaggaaacuguaugaaugucugugggcaggaagugaagagauccuucuguaaagguuuuuggaauuaugucugcugaauaauaaacuuuuuugaaauaauaaaucugguagaaaaaugagaucuaaaaaaaaaaaaaaaaaaaaaaaaaaaaaaaaaaaaaaaaaaaaaaaaaaaaaaaaaaaaaaaaugcaucccccccccccccccccccccccccccccccaaaggcucuuuucagagccaccagaauu

SEQ ID NO: 1691 - RNA, 2404 nt, Artificial Sequence
  mRNA product Design b-4 comprising derived and/or modified sequence from YFV__NC_002031.1__X-SS-prME (polyprotein: aa92-778) (wt)
gggagagucccgcagucggcguccagcggcucugcuuguucgugugugugucguugcaggccuuauucaagcuuaccaugagaggauuguccucaaggaaacgccguucccaugauguucugacugugcaauuccuaauuuugggaaugcuguugaugacggguggagugaccuuggugcggaaaaacagaugguugcuccuaaaugugacaucugaggaccucgggaaaacauucucugugggcacaggcaacugcacaacaaacauuuuggaagccaaguacuggugcccagacucaauggaauacaacugucccaaucucaguccaagagaggagccagaugacauugauugcuggugcuaugggguggaaaacguuagagucgcauaugguaagugugacucagcaggcaggucuaggaggucaagaagggccauugacuugccuacgcaugaaaaccaugguuugaagacccggcaagaaaaauggaugacuggaagaaugggugaaaggcaacuccaaaagauugagagaugguucgugaggaaccccuuuuuugcagugacggcucugaccauugccuaccuugugggaagcaacaugacgcaacgagucgugauugcccuacuggucuuggcuguugguccggccuacucagcucacugcauuggaauuacugacagggauuucauugagggggugcauggaggaacuuggguuucagcuacccuggagcaagacaagugugucacuguuauggccccugacaagccuucauuggacaucucacuagagacaguagccauugauagaccugcugaggugaggaaaguguguuacaaugcaguucucacucaugugaagauuaaugacaagugccccagcacuggagaggcccaccuagcugaagagaacgaaggggacaaugcgugcaagcgcacuuauucugauagaggcuggggcaauggcuguggccuauuugggaaagggagcauuguggcaugcgccaaauucacuugugccaaauccaugaguuuguuugagguugaucagaccaaaauucaguaugucaucagagcacaauugcauguaggggccaagcaggaaaauuggaauaccgacauuaagacucucaaguuugaugcccugucaggcucccaggaagucgaguucauuggguauggaaaagcuacacuggaaugccaggugcaaacugcgguggacuuugguaacaguuacaucgcugagauggaaacagagagcuggauaguggacagacagugggcccaggacuugacccugccauggcagaguggaaguggcgggguguggagagagaugcaucaucuugucgaauuugaaccuccgcaugccgccacuaucagaguacuggcccugggaaaccaggaaggcuccuugaaaacagcucuuacuggcgcaaugaggguuacaaaggacacaaaugacaacaaccuuuacaaacuacaugguggacauguuucuugcagagugaaauugucagcuuugacacucaaggggacauccuacaaaauaugcacugacaaaauguuuuuugucaagaacccaacugacacuggccauggcacuguugugaugcaggugaaagugucaaaaggagcccccugcaggauuccagugauaguagcugaugaucuuacagcggcaaucaauaaaggcauuuugguuacaguuaaccccaucgccucaaccaaugaugaugaagugcugauugaggugaacccaccuuuuggagacagcuacauuaucguugggagaggagauucacgucucacuuaccaguggcacaaagagggaagcucaauaggaaaguuguucacucagaccaugaaaggcguggaacgccuggccgucaugggagacaccgccugggauuucagcuccgcuggaggguucuucacuucgguugggaaaggaauccauacgguguuuggcucugccuuucaggggcuauuuggcggcuugaacuggauaacaaaggucaucaugggggcgguacuuauauggguuggcaucaacacaagaaacaugacaauguccaugagcaugaucuugguaggagugaucaugauguuuuugucucuaggaguuggggcguaaggacuaguaauaaggaaacuguaugaaugucugugggcaggaagugaagagauccuucuguaaagguuuuuggaauuaugucugcugaauaauaaacuuuuuugaaauaauaaaucugguagaaaaaugagaucuaaaaaaaaaaaaaaaaaaaaaaaaaaaaaaaaaaaaaaaaaaaaaaaaaaaaaaaaaaaaaaaaugcaucccccccccccccccccccccccccccccccaaaggcucuuuucagagccaccagaauu

SEQ ID NO: 1692 - RNA, 2407 nt, Artificial Sequence
  mRNA product Design b-4 comprising derived and/or modified sequence from YFV__NC_002031.1__SSjev(V3)-prME-XX (polyprotein: aa122-788) (wt)
gggagagucccgcagucggcguccagcggcucugcuuguucgugugugugucguugcaggccuuauucaagcuuaccaugaaugaaggcucaaucauguggcucgcgagcuuggcaguugucauagcuugugcaggagccgugaccuuggugcggaaaaacagaugguugcuccuaaaugugacaucugaggaccucgggaaaacauucucugugggcacaggcaacugcacaacaaacauuuuggaagccaaguacuggugcccagacucaauggaauacaacugucccaaucucaguccaagagaggagccagaugacauugauugcuggugcuaugggguggaaaacguuagagucgcauaugguaagugugacucagcaggcaggucuaggaggucaagaagggccauugacuugccuacgcaugaaaaccaugguuugaagacccggcaagaaaaauggaugacuggaagaaugggugaaaggcaacuccaaaagauugagagaugguucgugaggaaccccuuuuuugcagugacggcucugaccauugccuaccuugugggaagcaacaugacgcaacgagucgugauugcccuacuggucuuggcuguugguccggccuacucagcucacugcauuggaauuacugacagggauuucauugagggggugcauggaggaacuuggguuucagcuacccuggagcaagacaagugugucacuguuauggccccugacaagccuucauuggacaucucacuagagacaguagccauugauagaccugcugaggugaggaaaguguguuacaaugcaguucucacucaugugaagauuaaugacaagugccccagcacuggagaggcccaccuagcugaagagaacgaaggggacaaugcgugcaagcgcacuuauucugauagaggcuggggcaauggcuguggccuauuugggaaagggagcauuguggcaugcgccaaauucacuugugccaaauccaugaguuuguuugagguugaucagaccaaaauucaguaugucaucagagcacaauugcauguaggggccaagcaggaaaauuggaauaccgacauuaagacucucaaguuugaugcccugucaggcucccaggaagucgaguucauuggguauggaaaagcuacacuggaaugccaggugcaaacugcgguggacuuugguaacaguuacaucgcugagauggaaacagagagcuggauaguggacagacagugggcccaggacuugacccugccauggcagaguggaaguggcgggguguggagagagaugcaucaucuugucgaauuugaaccuccgcaugccgccacuaucagaguacuggcccugggaaaccaggaaggcuccuugaaaacagcucuuacuggcgcaaugaggguuacaaaggacacaaaugacaacaaccuuuacaaacuacaugguggacauguuucuugcagagugaaauugucagcuuugacacucaaggggacauccuacaaaauaugcacugacaaaauguuuuuugucaagaacccaacugacacuggccauggcacuguugugaugcaggugaaagugucaaaaggagcccccugcaggauuccagugauaguagcugaugaucuuacagcggcaaucaauaaaggcauuuugguuacaguuaaccccaucgccucaaccaaugaugaugaagugcugauugaggugaacccaccuuuuggagacagcuacauuaucguugggagaggagauucacgucucacuuaccaguggcacaaagagggaagcucaauaggaaaguuguucacucagaccaugaaaggcguggaacgccuggccgucaugggagacaccgccugggauuucagcuccgcuggaggguucuucacuucgguugggaaaggaauccauacgguguuuggcucugccuuucaggggcuauuuggcggcuugaacuggauaacaaaggucaucaugggggcgguacuuauauggguuggcaucaacacaagaaacaugacaauguccaugagcaugaucuugguaggagugaucaugauguuuuugucucuaggaguuggggcggaucaaggaugcgccaucaacuuuggcaaguaaggacuaguaauaaggaaacuguaugaaugucugugggcaggaagugaagagauccuucuguaaagguuuuuggaauuaugucugcugaauaauaaacuuuuuugaaauaauaaaucugguagaaaaaugagaucuaaaaaaaaaaaaaaaaaaaaaaaaaaaaaaaaaaaaaaaaaaaaaaaaaaaaaaaaaaaaaaaaugcaucccccccccccccccccccccccccccccccaaaggcucuuuucagagccaccagaauu

SEQ ID NO: 1693 - RNA, 2416 nt, Artificial Sequence
  mRNA product Design b-4 comprising derived and/or modified sequence from YFV__NC_002031.1__X-SS-prMEdelstem_TM-JEV (polyprotein: aa92-681) (opt1)
gggagagucccgcagucggcguccagcggcucugcuuguucgugugugugucguugcaggccuuauucaagcuuaccaugcggggccugagcucccgcaagcggcgcagccacgacgugcucaccguccaguuccugauccuggggaugcuccugaugaccggcggggugacgcuggugcggaagaaccgcuggcuccugcugaacgucaccuccgaggaccucggcaagaccuucagcguggggaccggcaacugcacgaccaacauccuggaggccaaguacuggugccccgacuccauggaguacaacugcccgaaccugagcccccgggaggagcccgacgacaucgacugcuggugcuacggcguggagaacguccgcguggccuacgggaagugcgacuccgcgggccggagccgccggucccgccgggccaucgaccuccccacccacgagaaccacgggcugaagacccgccaggagaaguggaugacgggccggaugggggagcgccagcugcagaagaucgagcggugguucgugcgcaacccguucuucgccgucaccgcccucaccaucgccuaccuggugggcagcaacaugacccagcggguggucaucgcgcugcucgugcuggccgugggccccgccuacuccgcccacugcaucgggaucacggaccgcgacuucaucgagggcguccacgggggcaccugggugagcgcgacccuggagcaggacaagugcgugaccgucauggcccccgacaagcccucccucgacaucagccuggagacgguggccaucgaccggccggccgaggugcgcaaggucugcuacaacgccgugcugacccacgugaagaucaacgacaagugccccuccaccggcgaggcgcaccucgccgaggagaacgagggggacaacgccugcaagcggaccuacagcgaccggggcugggggaacggcugcgggcuguucggcaagggcuccaucgucgccugcgccaaguucacgugcgcgaagagcaugucccuguucgagguggaccagaccaagauccaguacgucauccgcgcccagcuccacgugggggccaagcaggagaacuggaacaccgacaucaagacccugaaguucgacgcccugagcggcagccaggagguggaguucaucggguacggcaaggccacgcucgagugccagguccagaccgcgguggacuucgggaacuccuacaucgccgagauggagaccgagagcuggaucguggaccggcagugggcccaggaccugacccugcccuggcaguccggcagcggcggggucuggcgcgagaugcaccaccucguggaguucgagcccccgcacgccgccacgauccgggugcuggcgcugggcaaccaggaggggucccucaagaccgcccugaccggcgccaugcgcgucaccaaggacacgaacgacaacaaccuguacaagcuccacgggggccacgugagcugccgggugaagcuguccgcccugacccucaagggcaccagcuacaagaucugcaccgacaagauguucuucgucaagaaccccacggacaccgggcacggcaccguggugaugcaggucaagguguccaagggggcgcccugccgcaucccggugaucgucgccgacgaccugaccgccgccaucaacaagggcauccuggugaccgugaacccgaucgccagcacgaacgacgacgagguccucaucgaggugaacccccccuucggcgacuccuacaucaucguggggcggggcgacagccgccugaccuaccaguggcacaaggagggguccagcaucggcagcacccuggggaaggccuucuccaccacgcucaagggcgcccagcgccuggcggcccugggggacaccgccugggacuucggcagcaucgggggcguguucaacuccaucggccgggccguccaccagguguucgggggcgccuuccgcacccucuucgggggcaugagcuggaucacccaggggcugaugggcgcgcugcuccuguggaugggggugaacgcccgggaccgcuccaucgcccuggccuuccucgcgacgggcggcguccugguguuccuggccaccaacgugcacgccugaggacuaguaauaaggaaacuguaugaaugucugugggcaggaagugaagagauccuucuguaaagguuuuuggaauuaugucugcugaauaauaaacuuuuuugaaauaauaaaucugguagaaaaaugagaucuaaaaaaaaaaaaaaaaaaaaaaaaaaaaaaaaaaaaaaaaaaaaaaaaaaaaaaaaaaaaaaaaugcaucccccccccccccccccccccccccccccccaaaggcucuuuucagagccaccagaauu

SEQ ID NO: 1694 - RNA, 2389 nt, Artificial Sequence
  mRNA product Design b-4 comprising derived and/or modified sequence from YFV__NC_002031.1__SSjev(V3)-prMEdelstem_TM-JEV (polyprotein: aa122-681) (opt1)
gggagagucccgcagucggcguccagcggcucugcuuguucgugugugugucguugcaggccuuauucaagcuuaccaugaacgagggcagcaucauguggcuggccucccucgccguggucaucgcgugcgccggggccgugacgcuggugcggaagaaccgcuggcuccugcugaacgucaccuccgaggaccucggcaagaccuucagcguggggaccggcaacugcacgaccaacauccuggaggccaaguacuggugccccgacuccauggaguacaacugcccgaaccugagcccccgggaggagcccgacgacaucgacugcuggugcuacggcguggagaacguccgcguggccuacgggaagugcgacuccgcgggccggagccgccggucccgccgggccaucgaccuccccacccacgagaaccacgggcugaagacccgccaggagaaguggaugacgggccggaugggggagcgccagcugcagaagaucgagcggugguucgugcgcaacccguucuucgccgucaccgcccucaccaucgccuaccuggugggcagcaacaugacccagcggguggucaucgcgcugcucgugcuggccgugggccccgccuacuccgcccacugcaucgggaucacggaccgcgacuucaucgagggcguccacgggggcaccugggugagcgcgacccuggagcaggacaagugcgugaccgucauggcccccgacaagcccucccucgacaucagccuggagacgguggccaucgaccggccggccgaggugcgcaaggucugcuacaacgccgugcugacccacgugaagaucaacgacaagugccccuccaccggcgaggcgcaccucgccgaggagaacgagggggacaacgccugcaagcggaccuacagcgaccggggcugggggaacggcugcgggcuguucggcaagggcuccaucgucgccugcgccaaguucacgugcgcgaagagcaugucccuguucgagguggaccagaccaagauccaguacgucauccgcgcccagcuccacgugggggccaagcaggagaacuggaacaccgacaucaagacccugaaguucgacgcccugagcggcagccaggagguggaguucaucggguacggcaaggccacgcucgagugccagguccagaccgcgguggacuucgggaacuccuacaucgccgagauggagaccgagagcuggaucguggaccggcagugggcccaggaccugacccugcccuggcaguccggcagcggcggggucuggcgcgagaugcaccaccucguggaguucgagcccccgcacgccgccacgauccgggugcuggcgcugggcaaccaggaggggucccucaagaccgcccugaccggcgccaugcgcgucaccaaggacacgaacgacaacaaccuguacaagcuccacgggggccacgugagcugccgggugaagcuguccgcccugacccucaagggcaccagcuacaagaucugcaccgacaagauguucuucgucaagaaccccacggacaccgggcacggcaccguggugaugcaggucaagguguccaagggggcgcccugccgcaucccggugaucgucgccgacgaccugaccgccgccaucaacaagggcauccuggugaccgugaacccgaucgccagcacgaacgacgacgagguccucaucgaggugaacccccccuucggcgacuccuacaucaucguggggcggggcgacagccgccugaccuaccaguggcacaaggagggguccagcaucggcagcacccuggggaaggccuucuccaccacgcucaagggcgcccagcgccuggcggcccugggggacaccgccugggacuucggcagcaucgggggcguguucaacuccaucggccgggccguccaccagguguucgggggcgccuuccgcacccucuucgggggcaugagcuggaucacccaggggcugaugggcgcgcugcuccuguggaugggggugaacgcccgggaccgcuccaucgcccuggccuuccucgcgacgggcggcguccugguguuccuggccaccaacgugcacgccugaggacuaguaauaaggaaacuguaugaaugucugugggcaggaagugaagagauccuucuguaaagguuuuuggaauuaugucugcugaauaauaaacuuuuuugaaauaauaaaucugguagaaaaaugagaucuaaaaaaaaaaaaaaaaaaaaaaaaaaaaaaaaaaaaaaaaaaaaaaaaaaaaaaaaaaaaaaaaugcaucccccccccccccccccccccccccccccccaaaggcucuuuucagagccaccagaauu

SEQ ID NO: 1695 - RNA, 2404 nt, Artificial Sequence
  mRNA product Design b-4 comprising derived and/or modified sequence from YFV__NC_002031.1__X-SS-prME (polyprotein: aa92-778) (opt1)
gggagagucccgcagucggcguccagcggcucugcuuguucgugugugugucguugcaggccuuauucaagcuuaccaugcggggccugagcucccgcaagcggcgcagccacgacgugcucaccguccaguuccugauccuggggaugcuccugaugaccggcggggugacgcuggugcggaagaaccgcuggcuccugcugaacgucaccuccgaggaccucggcaagaccuucagcguggggaccggcaacugcacgaccaacauccuggaggccaaguacuggugccccgacuccauggaguacaacugcccgaaccugagcccccgggaggagcccgacgacaucgacugcuggugcuacggcguggagaacguccgcguggccuacgggaagugcgacuccgcgggccggagccgccggucccgccgggccaucgaccuccccacccacgagaaccacgggcugaagacccgccaggagaaguggaugacgggccggaugggggagcgccagcugcagaagaucgagcggugguucgugcgcaacccguucuucgccgucaccgcccucaccaucgccuaccuggugggcagcaacaugacccagcggguggucaucgcgcugcucgugcuggccgugggccccgccuacuccgcccacugcaucgggaucacggaccgcgacuucaucgagggcguccacgggggcaccugggugagcgcgacccuggagcaggacaagugcgugaccgucauggcccccgacaagcccucccucgacaucagccuggagacgguggccaucgaccggccggccgaggugcgcaaggucugcuacaacgccgugcugacccacgugaagaucaacgacaagugccccuccaccggcgaggcgcaccucgccgaggagaacgagggggacaacgccugcaagcggaccuacagcgaccggggcugggggaacggcugcgggcuguucggcaagggcuccaucgucgccugcgccaaguucacgugcgcgaagagcaugucccuguucgagguggaccagaccaagauccaguacgucauccgcgcccagcuccacgugggggccaagcaggagaacuggaacaccgacaucaagacccugaaguucgacgcccugagcggcagccaggagguggaguucaucggguacggcaaggccacgcucgagugccagguccagaccgcgguggacuucgggaacuccuacaucgccgagauggagaccgagagcuggaucguggaccggcagugggcccaggaccugacccugcccuggcaguccggcagcggcggggucuggcgcgagaugcaccaccucguggaguucgagcccccgcacgccgccacgauccgggugcuggcgcugggcaaccaggaggggucccucaagaccgcccugaccggcgccaugcgcgucaccaaggacacgaacgacaacaaccuguacaagcuccacgggggccacgugagcugccgggugaagcuguccgcccugacccucaagggcaccagcuacaagaucugcaccgacaagauguucuucgucaagaaccccacggacaccgggcacggcaccguggugaugcaggucaagguguccaagggggcgcccugccgcaucccggugaucgucgccgacgaccugaccgccgccaucaacaagggcauccuggugaccgugaacccgaucgccagcacgaacgacgacgagguccucaucgaggugaacccccccuucggcgacuccuacaucaucguggggcggggcgacagccgccugaccuaccaguggcacaaggagggguccagcaucggcaagcuguucacccagaccaugaagggggucgagcggcuggcggugaugggcgacacggccugggacuucuccagcgccggcggguucuucaccuccgugggcaaggggauccacaccgucuucggcagcgccuuccaggggcucuucggcggccugaacuggaucaccaaggugaucaugggggccgugcugaucugggucggcaucaacacgcgcaacaugaccauguccaugagcaugauccucgugggggugaucaugauguuccugagccugggcgucggggcgugaggacuaguaauaaggaaacuguaugaaugucugugggcaggaagugaagagauccuucuguaaagguuuuuggaauuaugucugcugaauaauaaacuuuuuugaaauaauaaaucugguagaaaaaugagaucuaaaaaaaaaaaaaaaaaaaaaaaaaaaaaaaaaaaaaaaaaaaaaaaaaaaaaaaaaaaaaaaaugcaucccccccccccccccccccccccccccccccaaaggcucuuuucagagccaccagaauu

SEQ ID NO: 1696 - RNA, 2407 nt, Artificial Sequence
  mRNA product Design b-4 comprising derived and/or modified sequence from YFV__NC_002031.1__SSjev(V3)-prME-XX (polyprotein: aa122-788) (opt1)
gggagagucccgcagucggcguccagcggcucugcuuguucgugugugugucguugcaggccuuauucaagcuuaccaugaacgagggcagcaucauguggcuggccucccucgccguggucaucgcgugcgccggggccgugacgcuggugcggaagaaccgcuggcuccugcugaacgucaccuccgaggaccucggcaagaccuucagcguggggaccggcaacugcacgaccaacauccuggaggccaaguacuggugccccgacuccauggaguacaacugcccgaaccugagcccccgggaggagcccgacgacaucgacugcuggugcuacggcguggagaacguccgcguggccuacgggaagugcgacuccgcgggccggagccgccggucccgccgggccaucgaccuccccacccacgagaaccacgggcugaagacccgccaggagaaguggaugacgggccggaugggggagcgccagcugcagaagaucgagcggugguucgugcgcaacccguucuucgccgucaccgcccucaccaucgccuaccuggugggcagcaacaugacccagcggguggucaucgcgcugcucgugcuggccgugggccccgccuacuccgcccacugcaucgggaucacggaccgcgacuucaucgagggcguccacgggggcaccugggugagcgcgacccuggagcaggacaagugcgugaccgucauggcccccgacaagcccucccucgacaucagccuggagacgguggccaucgaccggccggccgaggugcgcaaggucugcuacaacgccgugcugacccacgugaagaucaacgacaagugccccuccaccggcgaggcgcaccucgccgaggagaacgagggggacaacgccugcaagcggaccuacagcgaccggggcugggggaacggcugcgggcuguucggcaagggcuccaucgucgccugcgccaaguucacgugcgcgaagagcaugucccuguucgagguggaccagaccaagauccaguacgucauccgcgcccagcuccacgugggggccaagcaggagaacuggaacaccgacaucaagacccugaaguucgacgcccugagcggcagccaggagguggaguucaucggguacggcaaggccacgcucgagugccagguccagaccgcgguggacuucgggaacuccuacaucgccgagauggagaccgagagcuggaucguggaccggcagugggcccaggaccugacccugcccuggcaguccggcagcggcggggucuggcgcgagaugcaccaccucguggaguucgagcccccgcacgccgccacgauccgggugcuggcgcugggcaaccaggaggggucccucaagaccgcccugaccggcgccaugcgcgucaccaaggacacgaacgacaacaaccuguacaagcuccacgggggccacgugagcugccgggugaagcuguccgcccugacccucaagggcaccagcuacaagaucugcaccgacaagauguucuucgucaagaaccccacggacaccgggcacggcaccguggugaugcaggucaagguguccaagggggcgcccugccgcaucccggugaucgucgccgacgaccugaccgccgccaucaacaagggcauccuggugaccgugaacccgaucgccagcacgaacgacgacgagguccucaucgaggugaacccccccuucggcgacuccuacaucaucguggggcggggcgacagccgccugaccuaccaguggcacaaggagggguccagcaucggcaagcuguucacccagaccaugaagggggucgagcggcuggcggugaugggcgacacggccugggacuucuccagcgccggcggguucuucaccuccgugggcaaggggauccacaccgucuucggcagcgccuuccaggggcucuucggcggccugaacuggaucaccaaggugaucaugggggccgugcugaucugggucggcaucaacacgcgcaacaugaccauguccaugagcaugauccucgugggggugaucaugauguuccugagccugggcgucggggcggaccagggcugcgccaucaacuucggcaagugaggacuaguaauaaggaaacuguaugaaugucugugggcaggaagugaagagauccuucuguaaagguuuuuggaauuaugucugcugaauaauaaacuuuuuugaaauaauaaaucugguagaaaaaugagaucuaaaaaaaaaaaaaaaaaaaaaaaaaaaaaaaaaaaaaaaaaaaaaaaaaaaaaaaaaaaaaaaaugcaucccccccccccccccccccccccccccccccaaaggcucuuuucagagccaccagaauu

SEQ ID NO: 1697 - RNA, 2416 nt, Artificial Sequence
  mRNA product Design b-4 comprising derived and/or modified sequence from YFV__NC_002031.1__X-SS-prMEdelstem_TM-JEV (polyprotein: aa92-681) (opt1)
gggagagucccgcagucggcguccagcggcucugcuuguucgugugugugucguugcaggccuuauucaagcuuaccaugcggggccugagcucccgcaagcggcgcagccacgacgugcucaccguccaguuccugauccuggggaugcuccugaugaccggcggggugacgcuggugcggaagaaccgcuggcuccugcugaacgucaccuccgaggaccucggcaagaccuucagcguggggaccggcaacugcacgaccaacauccuggaggccaaguacuggugccccgacuccauggaguacaacugcccgaaccugagcccccgggaggagcccgacgacaucgacugcuggugcuacggcguggagaacguccgcguggccuacgggaagugcgacuccgcgggccggagccgccggucccgccgggccaucgaccuccccacccacgagaaccacgggcugaagacccgccaggagaaguggaugacgggccggaugggggagcgccagcugcagaagaucgagcggugguucgugcgcaacccguucuucgccgucaccgcccucaccaucgccuaccuggugggcagcaacaugacccagcggguggucaucgcgcugcucgugcuggccgugggccccgccuacuccgcccacugcaucgggaucacggaccgcgacuucaucgagggcguccacgggggcaccugggugagcgcgacccuggagcaggacaagugcgugaccgucauggcccccgacaagcccucccucgacaucagccuggagacgguggccaucgaccggccggccgaggugcgcaaggucugcuacaacgccgugcugacccacgugaagaucaacgacaagugccccuccaccggcgaggcgcaccucgccgaggagaacgagggggacaacgccugcaagcggaccuacagcgaccggggcugggggaacggcugcgggcuguucggcaagggcuccaucgucgccugcgccaaguucacgugcgcgaaguccaugagccuguucgagguggaccagaccaagauccaguacgucauccgcgcccagcuccacgugggggccaagcaggagaacuggaacaccgacaucaagacccugaaguucgacgcccugagcggcagccaggagguggaguucaucggguacggcaaggccacgcucgagugccagguccagaccgcgguggacuucgggaacuccuacaucgccgagauggagaccgagagcuggaucguggaccggcagugggcccaggaccugacccugcccuggcaguccggcagcggcggggucuggcgcgagaugcaccaccucguggaguucgagcccccgcacgccgccacgauccgggugcuggcgcugggcaaccaggaggggucccucaagaccgcccugaccggcgccaugcgcgucaccaaggacacgaacgacaacaaccuguacaagcuccacgggggccacgugagcugccgggugaagcuguccgcccugacccucaagggcaccagcuacaagaucugcaccgacaagauguucuucgucaagaaccccacggacaccgggcacggcaccguggugaugcaggucaagguguccaagggggcgcccugccgcaucccggugaucgucgccgacgaccugaccgccgccaucaacaagggcauccuggugaccgugaacccgaucgccagcacgaacgacgacgagguccucaucgaggugaacccccccuucggcgacuccuacaucaucguggggcggggcgacagccgccugaccuaccaguggcacaaggagggguccagcaucggcagcacccuggggaaggccuucuccaccacgcucaagggcgcccagcgccuggcggcccugggggacaccgccugggacuucggcagcaucgggggcguguucaacuccaucggccgggccguccaccagguguucgggggcgccuuccgcacccucuucgggggcaugagcuggaucacccaggggcugaugggcgcgcugcuccuguggaugggggugaacgcccgggaccgcuccaucgcccuggccuuccucgcgacgggcggcguccugguguuccuggccaccaacgugcacgccugaggacuaguaauaaggaaacuguaugaaugucugugggcaggaagugaagagauccuucuguaaagguuuuuggaauuaugucugcugaauaauaaacuuuuuugaaauaauaaaucugguagaaaaaugagaucuaaaaaaaaaaaaaaaaaaaaaaaaaaaaaaaaaaaaaaaaaaaaaaaaaaaaaaaaaaaaaaaaugcaucccccccccccccccccccccccccccccccaaaggcucuuuucagagccaccagaauu

SEQ ID NO: 1698 - RNA, 2389 nt, Artificial Sequence
  mRNA product Design b-4 comprising derived and/or modified sequence from YFV__NC_002031.1__SSjev(V3)-prMEdelstem_TM-JEV (polyprotein: aa122-681) (opt1)
gggagagucccgcagucggcguccagcggcucugcuuguucgugugugugucguugcaggccuuauucaagcuuaccaugaacgagggcagcaucauguggcuggccucccucgccguggucaucgcgugcgccggggccgugacgcuggugcggaagaaccgcuggcuccugcugaacgucaccuccgaggaccucggcaagaccuucagcguggggaccggcaacugcacgaccaacauccuggaggccaaguacuggugccccgacuccauggaguacaacugcccgaaccugagcccccgggaggagcccgacgacaucgacugcuggugcuacggcguggagaacguccgcguggccuacgggaagugcgacuccgcgggccggagccgccggucccgccgggccaucgaccuccccacccacgagaaccacgggcugaagacccgccaggagaaguggaugacgggccggaugggggagcgccagcugcagaagaucgagcggugguucgugcgcaacccguucuucgccgucaccgcccucaccaucgccuaccuggugggcagcaacaugacccagcggguggucaucgcgcugcucgugcuggccgugggccccgccuacuccgcccacugcaucgggaucacggaccgcgacuucaucgagggcguccacgggggcaccugggugagcgcgacccuggagcaggacaagugcgugaccgucauggcccccgacaagcccucccucgacaucagccuggagacgguggccaucgaccggccggccgaggugcgcaaggucugcuacaacgccgugcugacccacgugaagaucaacgacaagugccccuccaccggcgaggcgcaccucgccgaggagaacgagggggacaacgccugcaagcggaccuacagcgaccggggcugggggaacggcugcgggcuguucggcaagggcuccaucgucgccugcgccaaguucacgugcgcgaaguccaugagccuguucgagguggaccagaccaagauccaguacgucauccgcgcccagcuccacgugggggccaagcaggagaacuggaacaccgacaucaagacccugaaguucgacgcccugagcggcagccaggagguggaguucaucggguacggcaaggccacgcucgagugccagguccagaccgcgguggacuucgggaacuccuacaucgccgagauggagaccgagagcuggaucguggaccggcagugggcccaggaccugacccugcccuggcaguccggcagcggcggggucuggcgcgagaugcaccaccucguggaguucgagcccccgcacgccgccacgauccgggugcuggcgcugggcaaccaggaggggucccucaagaccgcccugaccggcgccaugcgcgucaccaaggacacgaacgacaacaaccuguacaagcuccacgggggccacgugagcugccgggugaagcuguccgcccugacccucaagggcaccagcuacaagaucugcaccgacaagauguucuucgucaagaaccccacggacaccgggcacggcaccguggugaugcaggucaagguguccaagggggcgcccugccgcaucccggugaucgucgccgacgaccugaccgccgccaucaacaagggcauccuggugaccgugaacccgaucgccagcacgaacgacgacgagguccucaucgaggugaacccccccuucggcgacuccuacaucaucguggggcggggcgacagccgccugaccuaccaguggcacaaggagggguccagcaucggcagcacccuggggaaggccuucuccaccacgcucaagggcgcccagcgccuggcggcccugggggacaccgccugggacuucggcagcaucgggggcguguucaacuccaucggccgggccguccaccagguguucgggggcgccuuccgcacccucuucgggggcaugagcuggaucacccaggggcugaugggcgcgcugcuccuguggaugggggugaacgcccgggaccgcuccaucgcccuggccuuccucgcgacgggcggcguccugguguuccuggccaccaacgugcacgccugaggacuaguaauaaggaaacuguaugaaugucugugggcaggaagugaagagauccuucuguaaagguuuuuggaauuaugucugcugaauaauaaacuuuuuugaaauaauaaaucugguagaaaaaugagaucuaaaaaaaaaaaaaaaaaaaaaaaaaaaaaaaaaaaaaaaaaaaaaaaaaaaaaaaaaaaaaaaaugcaucccccccccccccccccccccccccccccccaaaggcucuuuucagagccaccagaauu

SEQ ID NO: 1699 - RNA, 2404 nt, Artificial Sequence
  mRNA product Design b-4 comprising derived and/or modified sequence from YFV__NC_002031.1__X-SS-prME (polyprotein: aa92-778) (opt1)
gggagagucccgcagucggcguccagcggcucugcuuguucgugugugugucguugcaggccuuauucaagcuuaccaugcggggccugagcucccgcaagcggcgcagccacgacgugcucaccguccaguuccugauccuggggaugcuccugaugaccggcggggugacgcuggugcggaagaaccgcuggcuccugcugaacgucaccuccgaggaccucggcaagaccuucagcguggggaccggcaacugcacgaccaacauccuggaggccaaguacuggugccccgacuccauggaguacaacugcccgaaccugagcccccgggaggagcccgacgacaucgacugcuggugcuacggcguggagaacguccgcguggccuacgggaagugcgacuccgcgggccggagccgccggucccgccgggccaucgaccuccccacccacgagaaccacgggcugaagacccgccaggagaaguggaugacgggccggaugggggagcgccagcugcagaagaucgagcggugguucgugcgcaacccguucuucgccgucaccgcccucaccaucgccuaccuggugggcagcaacaugacccagcggguggucaucgcgcugcucgugcuggccgugggccccgccuacuccgcccacugcaucgggaucacggaccgcgacuucaucgagggcguccacgggggcaccugggugagcgcgacccuggagcaggacaagugcgugaccgucauggcccccgacaagcccucccucgacaucagccuggagacgguggccaucgaccggccggccgaggugcgcaaggucugcuacaacgccgugcugacccacgugaagaucaacgacaagugccccuccaccggcgaggcgcaccucgccgaggagaacgagggggacaacgccugcaagcggaccuacagcgaccggggcugggggaacggcugcgggcuguucggcaagggcuccaucgucgccugcgccaaguucacgugcgcgaaguccaugagccuguucgagguggaccagaccaagauccaguacgucauccgcgcccagcuccacgugggggccaagcaggagaacuggaacaccgacaucaagacccugaaguucgacgcccugagcggcagccaggagguggaguucaucggguacggcaaggccacgcucgagugccagguccagaccgcgguggacuucgggaacuccuacaucgccgagauggagaccgagagcuggaucguggaccggcagugggcccaggaccugacccugcccuggcaguccggcagcggcggggucuggcgcgagaugcaccaccucguggaguucgagcccccgcacgccgccacgauccgggugcuggcgcugggcaaccaggaggggucccucaagaccgcccugaccggcgccaugcgcgucaccaaggacacgaacgacaacaaccuguacaagcuccacgggggccacgugagcugccgggugaagcuguccgcccugacccucaagggcaccagcuacaagaucugcaccgacaagauguucuucgucaagaaccccacggacaccgggcacggcaccguggugaugcaggucaagguguccaagggggcgcccugccgcaucccggugaucgucgccgacgaccugaccgccgccaucaacaagggcauccuggugaccgugaacccgaucgccagcacgaacgacgacgagguccucaucgaggugaacccccccuucggcgacuccuacaucaucguggggcggggcgacagccgccugaccuaccaguggcacaaggagggguccagcaucggcaagcuguucacccagaccaugaagggggucgagcggcuggcggugaugggcgacacggccugggacuucuccagcgccggcggguucuucaccuccgugggcaaggggauccacaccgucuucggcagcgccuuccaggggcuguucggcggccucaacuggaucaccaaggugaucaugggggccgugcugaucugggucggcaucaacacgcgcaacaugaccauguccaugagcaugauccucgugggggugaucaugauguuccugagccugggcgucggggcgugaggacuaguaauaaggaaacuguaugaaugucugugggcaggaagugaagagauccuucuguaaagguuuuuggaauuaugucugcugaauaauaaacuuuuuugaaauaauaaaucugguagaaaaaugagaucuaaaaaaaaaaaaaaaaaaaaaaaaaaaaaaaaaaaaaaaaaaaaaaaaaaaaaaaaaaaaaaaaugcaucccccccccccccccccccccccccccccccaaaggcucuuuucagagccaccagaauu

SEQ ID NO: 1700 - RNA, 2407 nt, Artificial Sequence
  mRNA product Design b-4 comprising derived and/or modified sequence from YFV__NC_002031.1__SSjev(V3)-prME-XX (polyprotein: aa122-788) (opt1)
gggagagucccgcagucggcguccagcggcucugcuuguucgugugugugucguugcaggccuuauucaagcuuaccaugaacgagggcagcaucauguggcuggccucccucgccguggucaucgcgugcgccggggccgugacgcuggugcggaagaaccgcuggcuccugcugaacgucaccuccgaggaccucggcaagaccuucagcguggggaccggcaacugcacgaccaacauccuggaggccaaguacuggugccccgacuccauggaguacaacugcccgaaccugagcccccgggaggagcccgacgacaucgacugcuggugcuacggcguggagaacguccgcguggccuacgggaagugcgacuccgcgggccggagccgccggucccgccgggccaucgaccuccccacccacgagaaccacgggcugaagacccgccaggagaaguggaugacgggccggaugggggagcgccagcugcagaagaucgagcggugguucgugcgcaacccguucuucgccgucaccgcccucaccaucgccuaccuggugggcagcaacaugacccagcggguggucaucgcgcugcucgugcuggccgugggccccgccuacuccgcccacugcaucgggaucacggaccgcgacuucaucgagggcguccacgggggcaccugggugagcgcgacccuggagcaggacaagugcgugaccgucauggcccccgacaagcccucccucgacaucagccuggagacgguggccaucgaccggccggccgaggugcgcaaggucugcuacaacgccgugcugacccacgugaagaucaacgacaagugccccuccaccggcgaggcgcaccucgccgaggagaacgagggggacaacgccugcaagcggaccuacagcgaccggggcugggggaacggcugcgggcuguucggcaagggcuccaucgucgccugcgccaaguucacgugcgcgaaguccaugagccuguucgagguggaccagaccaagauccaguacgucauccgcgcccagcuccacgugggggccaagcaggagaacuggaacaccgacaucaagacccugaaguucgacgcccugagcggcagccaggagguggaguucaucggguacggcaaggccacgcucgagugccagguccagaccgcgguggacuucgggaacuccuacaucgccgagauggagaccgagagcuggaucguggaccggcagugggcccaggaccugacccugcccuggcaguccggcagcggcggggucuggcgcgagaugcaccaccucguggaguucgagcccccgcacgccgccacgauccgggugcuggcgcugggcaaccaggaggggucccucaagaccgcccugaccggcgccaugcgcgucaccaaggacacgaacgacaacaaccuguacaagcuccacgggggccacgugagcugccgggugaagcuguccgcccugacccucaagggcaccagcuacaagaucugcaccgacaagauguucuucgucaagaaccccacggacaccgggcacggcaccguggugaugcaggucaagguguccaagggggcgcccugccgcaucccggugaucgucgccgacgaccugaccgccgccaucaacaagggcauccuggugaccgugaacccgaucgccagcacgaacgacgacgagguccucaucgaggugaacccccccuucggcgacuccuacaucaucguggggcggggcgacagccgccugaccuaccaguggcacaaggagggguccagcaucggcaagcuguucacccagaccaugaagggggucgagcggcuggcggugaugggcgacacggccugggacuucuccagcgccggcggguucuucaccuccgugggcaaggggauccacaccgucuucggcagcgccuuccaggggcuguucggcggccucaacuggaucaccaaggugaucaugggggccgugcugaucugggucggcaucaacacgcgcaacaugaccauguccaugagcaugauccucgugggggugaucaugauguuccugagccugggcgucggggcggaccagggcugcgccaucaacuucggcaagugaggacuaguaauaaggaaacuguaugaaugucugugggcaggaagugaagagauccuucuguaaagguuuuuggaauuaugucugcugaauaauaaacuuuuuugaaauaauaaaucugguagaaaaaugagaucuaaaaaaaaaaaaaaaaaaaaaaaaaaaaaaaaaaaaaaaaaaaaaaaaaaaaaaaaaaaaaaaaugcaucccccccccccccccccccccccccccccccaaaggcucuuuucagagccaccagaauu

SEQ ID NO: 1701 - RNA, 2416 nt, Artificial Sequence
  mRNA product Design b-4 comprising derived and/or modified sequence from YFV__NC_002031.1__X-SS-prMEdelstem_TM-JEV (polyprotein: aa92-681) (opt1)
gggagagucccgcagucggcguccagcggcucugcuuguucgugugugugucguugcaggccuuauucaagcuuaccaugcggggccugagcucccgcaagcggcgcagccacgacgugcucaccguccaguuccugauccuggggaugcuccugaugaccggcggggugacgcuggugcggaagaaccgcuggcuccugcugaacgucaccuccgaggaccucggcaagaccuucagcguggggaccggcaacugcacgaccaacauccuggaggccaaguacuggugccccgacuccauggaguacaacugccccaaccugagcccccgggaggagcccgacgacaucgacugcuggugcuacggcguggagaacguccgcguggccuacgggaagugcgacuccgcgggccggagccgccggucccgccgggccaucgaccuccccacccacgagaaccacgggcugaagacccgccaggagaaguggaugacgggccggaugggggagcgccagcugcagaagaucgagcggugguucgugcgcaacccguucuucgccgucaccgcccucaccaucgccuaccuggugggcagcaacaugacccagcggguggucaucgcgcugcucgugcuggccgugggccccgccuacuccgcccacugcaucgggaucacggaccgcgacuucaucgagggcguccacgggggcaccugggugagcgcgacccuggagcaggacaagugcgugaccgucauggcccccgacaagcccucccucgacaucagccuggagacgguggccaucgaccggccggccgaggugcgcaaggucugcuacaacgccgugcugacccacgugaagaucaacgacaagugccccuccaccggcgaggcgcaccucgccgaggagaacgagggggacaacgccugcaagcggaccuacagcgaccggggcugggggaacggcugcgggcuguucggcaagggcuccaucgucgccugcgccaaguucacgugcgcgaaguccaugagccuguucgagguggaccagaccaagauccaguacgucauccgcgcccagcuccacgugggggccaagcaggagaacuggaacaccgacaucaagacccugaaguucgacgcccugagcggcagccaggagguggaguucaucggguacggcaaggccacgcucgagugccagguccagaccgcgguggacuucgggaacuccuacaucgccgagauggagaccgagagcuggaucguggaccggcagugggcccaggaccugacccugcccuggcaguccggcagcggcggggucuggcgcgagaugcaccaccucguggaguucgagcccccgcacgccgccacgauccgggugcuggcgcugggcaaccaggaggggucccucaagaccgcccugaccggcgccaugcgcgucaccaaggacacgaacgacaacaaccuguacaagcuccacgggggccacgugagcugccgggugaagcuguccgcccugacccucaagggcaccagcuacaagaucugcaccgacaagauguucuucgucaagaaccccacggacaccgggcacggcaccguggugaugcaggucaagguguccaagggggcgcccugccgcaucccggugaucgucgccgacgaccugaccgccgccaucaacaagggcauccuggugaccgugaacccgaucgccagcacgaacgacgacgagguccucaucgaggugaacccgcccuucggcgacuccuacaucaucguggggcggggcgacagccgccugaccuaccaguggcacaaggagggguccagcaucggaagcacgcugggcaaggccuuuucaacaacuuugaagggagcucaaagacuggcagcguugggcgacacagccugggacuuuggcucuauuggaggggucuucaacuccauagguagagccguucaccaaguguuuggaggugccuucagaacacucuuugggggaaugucuuggaucacacaagggcuaaugggugcccuacugcucuggaugggcgucaacgcacgagaccgaucaauugcuuuggccuucuuagccacaggaggugugcucguguucuuagcgaccaaugugcacgccugaggacuaguaauaaggaaacuguaugaaugucugugggcaggaagugaagagauccuucuguaaagguuuuuggaauuaugucugcugaauaauaaacuuuuuugaaauaauaaaucugguagaaaaaugagaucuaaaaaaaaaaaaaaaaaaaaaaaaaaaaaaaaaaaaaaaaaaaaaaaaaaaaaaaaaaaaaaaaugcaucccccccccccccccccccccccccccccccaaaggcucuuuucagagccaccagaauu

SEQ ID NO: 1702 - RNA, 2389 nt, Artificial Sequence
  mRNA product Design b-4 comprising derived and/or modified sequence from YFV__NC_002031.1__SSjev(V3)-prMEdelstem_TM-JEV (polyprotein: aa122-681) (opt1)
gggagagucccgcagucggcguccagcggcucugcuuguucgugugugugucguugcaggccuuauucaagcuuaccaugaacgagggcagcaucauguggcuggccucccucgccguggucaucgcgugcgccggggccgugacgcuggugcggaagaaccgcuggcuccugcugaacgucaccuccgaggaccucggcaagaccuucagcguggggaccggcaacugcacgaccaacauccuggaggccaaguacuggugccccgacuccauggaguacaacugccccaaccugagcccccgggaggagcccgacgacaucgacugcuggugcuacggcguggagaacguccgcguggccuacgggaagugcgacuccgcgggccggagccgccggucccgccgggccaucgaccuccccacccacgagaaccacgggcugaagacccgccaggagaaguggaugacgggccggaugggggagcgccagcugcagaagaucgagcggugguucgugcgcaacccguucuucgccgucaccgcccucaccaucgccuaccuggugggcagcaacaugacccagcggguggucaucgcgcugcucgugcuggccgugggccccgccuacuccgcccacugcaucgggaucacggaccgcgacuucaucgagggcguccacgggggcaccugggugagcgcgacccuggagcaggacaagugcgugaccgucauggcccccgacaagcccucccucgacaucagccuggagacgguggccaucgaccggccggccgaggugcgcaaggucugcuacaacgccgugcugacccacgugaagaucaacgacaagugccccuccaccggcgaggcgcaccucgccgaggagaacgagggggacaacgccugcaagcggaccuacagcgaccggggcugggggaacggcugcgggcuguucggcaagggcuccaucgucgccugcgccaaguucacgugcgcgaaguccaugagccuguucgagguggaccagaccaagauccaguacgucauccgcgcccagcuccacgugggggccaagcaggagaacuggaacaccgacaucaagacccugaaguucgacgcccugagcggcagccaggagguggaguucaucggguacggcaaggccacgcucgagugccagguccagaccgcgguggacuucgggaacuccuacaucgccgagauggagaccgagagcuggaucguggaccggcagugggcccaggaccugacccugcccuggcaguccggcagcggcggggucuggcgcgagaugcaccaccucguggaguucgagcccccgcacgccgccacgauccgggugcuggcgcugggcaaccaggaggggucccucaagaccgcccugaccggcgccaugcgcgucaccaaggacacgaacgacaacaaccuguacaagcuccacgggggccacgugagcugccgggugaagcuguccgcccugacccucaagggcaccagcuacaagaucugcaccgacaagauguucuucgucaagaaccccacggacaccgggcacggcaccguggugaugcaggucaagguguccaagggggcgcccugccgcaucccggugaucgucgccgacgaccugaccgccgccaucaacaagggcauccuggugaccgugaacccgaucgccagcacgaacgacgacgagguccucaucgaggugaacccgcccuucggcgacuccuacaucaucguggggcggggcgacagccgccugaccuaccaguggcacaaggagggguccagcaucggcagcacccuggggaaggccuucuccaccacgcucaagggcgcccagcgccuggcggcccugggggacaccgccugggacuucggcagcaucgggggcguguucaacuccaucggccgggccguccaccagguguucgggggcgccuuccgcacccucuucgggggcaugagcuggaucacccaggggcugaugggcgcgcugcuccuguggaugggggugaacgcccgggaccgcuccaucgcccuggccuuccucgcgacgggcggcguccugguguuccuggccaccaacgugcacgccugaggacuaguaauaaggaaacuguaugaaugucugugggcaggaagugaagagauccuucuguaaagguuuuuggaauuaugucugcugaauaauaaacuuuuuugaaauaauaaaucugguagaaaaaugagaucuaaaaaaaaaaaaaaaaaaaaaaaaaaaaaaaaaaaaaaaaaaaaaaaaaaaaaaaaaaaaaaaaugcaucccccccccccccccccccccccccccccccaaaggcucuuuucagagccaccagaauu

SEQ ID NO: 1703 - RNA, 2404 nt, Artificial Sequence
  mRNA product Design b-4 comprising derived and/or modified sequence from YFV__NC_002031.1__X-SS-prME (polyprotein: aa92-778) (opt1)
gggagagucccgcagucggcguccagcggcucugcuuguucgugugugugucguugcaggccuuauucaagcuuaccaugcggggccugagcucccgcaagcggcgcagccacgacgugcucaccguccaguuccugauccuggggaugcuccugaugaccggcggggugacgcuggugcggaagaaccgcuggcuccugcugaacgucaccuccgaggaccucggcaagaccuucagcguggggaccggcaacugcacgaccaacauccuggaggccaaguacuggugccccgacuccauggaguacaacugccccaaccugagcccccgggaggagcccgacgacaucgacugcuggugcuacggcguggagaacguccgcguggccuacgggaagugcgacuccgcgggccggagccgccggucccgccgggccaucgaccuccccacccacgagaaccacgggcugaagacccgccaggagaaguggaugacgggccggaugggggagcgccagcugcagaagaucgagcggugguucgugcgcaacccguucuucgccgucaccgcccucaccaucgccuaccuggugggcagcaacaugacccagcggguggucaucgcgcugcucgugcuggccgugggccccgccuacuccgcccacugcaucgggaucacggaccgcgacuucaucgagggcguccacgggggcaccugggugagcgcgacccuggagcaggacaagugcgugaccgucauggcccccgacaagcccucccucgacaucagccuggagacgguggccaucgaccggccggccgaggugcgcaaggucugcuacaacgccgugcugacccacgugaagaucaacgacaagugccccuccaccggcgaggcgcaccucgccgaggagaacgagggggacaacgccugcaagcggaccuacagcgaccggggcugggggaacggcugcgggcuguucggcaagggcuccaucgucgccugcgccaaguucacgugcgcgaaguccaugagccuguucgagguggaccagaccaagauccaguacgucauccgcgcccagcuccacgugggggccaagcaggagaacuggaacaccgacaucaagacccugaaguucgacgcccugagcggcagccaggagguggaguucaucggguacggcaaggccacgcucgagugccagguccagaccgcgguggacuucgggaacuccuacaucgccgagauggagaccgagagcuggaucguggaccggcagugggcccaggaccugacccugcccuggcaguccggcagcggcggggucuggcgcgagaugcaccaccucguggaguucgagcccccgcacgccgccacgauccgggugcuggcgcugggcaaccaggaggggucccucaagaccgcccugaccggcgccaugcgcgucaccaaggacacgaacgacaacaaccuguacaagcuccacgggggccacgugagcugccgggugaagcuguccgcccugacccucaagggcaccagcuacaagaucugcaccgacaagauguucuucgucaagaaccccacggacaccgggcacggcaccguggugaugcaggucaagguguccaagggggcgcccugccgcaucccggugaucgucgccgacgaccugaccgccgccaucaacaagggcauccuggugaccgugaacccgaucgccagcacgaacgacgacgagguccucaucgaggugaacccgcccuucggcgacuccuacaucaucguggggcggggcgacagccgccugaccuaccaguggcacaaggagggguccagcaucggcaagcuguucacccagaccaugaagggggucgagcggcuggcggugaugggcgacacggccugggacuucuccagcgccggcggguucuucaccuccgugggcaaggggauccacaccgucuucggcagcgccuuccaggggcuguucggcggccucaacuggaucaccaaggugaucaugggggccgugcugaucugggucggcaucaacacgcgcaacaugaccauguccaugagcaugauccucgugggggugaucaugauguuccugagccugggcgucggggcgugaggacuaguaauaaggaaacuguaugaaugucugugggcaggaagugaagagauccuucuguaaagguuuuuggaauuaugucugcugaauaauaaacuuuuuugaaauaauaaaucugguagaaaaaugagaucuaaaaaaaaaaaaaaaaaaaaaaaaaaaaaaaaaaaaaaaaaaaaaaaaaaaaaaaaaaaaaaaaugcaucccccccccccccccccccccccccccccccaaaggcucuuuucagagccaccagaauu

SEQ ID NO: 1704 - RNA, 2407 nt, Artificial Sequence
  mRNA product Design b-4 comprising derived and/or modified sequence from YFV__NC_002031.1__SSjev(V3)-prME-XX (polyprotein: aa122-788) (opt1)
gggagagucccgcagucggcguccagcggcucugcuuguucgugugugugucguugcaggccuuauucaagcuuaccaugaacgagggcagcaucauguggcuggccucccucgccguggucaucgcgugcgccggggccgugacgcuggugcggaagaaccgcuggcuccugcugaacgucaccuccgaggaccucggcaagaccuucagcguggggaccggcaacugcacgaccaacauccuggaggccaaguacuggugccccgacuccauggaguacaacugccccaaccugagcccccgggaggagcccgacgacaucgacugcuggugcuacggcguggagaacguccgcguggccuacgggaagugcgacuccgcgggccggagccgccggucccgccgggccaucgaccuccccacccacgagaaccacgggcugaagacccgccaggagaaguggaugacgggccggaugggggagcgccagcugcagaagaucgagcggugguucgugcgcaacccguucuucgccgucaccgcccucaccaucgccuaccuggugggcagcaacaugacccagcggguggucaucgcgcugcucgugcuggccgugggccccgccuacuccgcccacugcaucgggaucacggaccgcgacuucaucgagggcguccacgggggcaccugggugagcgcgacccuggagcaggacaagugcgugaccgucauggcccccgacaagcccucccucgacaucagccuggagacgguggccaucgaccggccggccgaggugcgcaaggucugcuacaacgccgugcugacccacgugaagaucaacgacaagugccccuccaccggcgaggcgcaccucgccgaggagaacgagggggacaacgccugcaagcggaccuacagcgaccggggcugggggaacggcugcgggcuguucggcaagggcuccaucgucgccugcgccaaguucacgugcgcgaaguccaugagccuguucgagguggaccagaccaagauccaguacgucauccgcgcccagcuccacgugggggccaagcaggagaacuggaacaccgacaucaagacccugaaguucgacgcccugagcggcagccaggagguggaguucaucggguacggcaaggccacgcucgagugccagguccagaccgcgguggacuucgggaacuccuacaucgccgagauggagaccgagagcuggaucguggaccggcagugggcccaggaccugacccugcccuggcaguccggcagcggcggggucuggcgcgagaugcaccaccucguggaguucgagcccccgcacgccgccacgauccgggugcuggcgcugggcaaccaggaggggucccucaagaccgcccugaccggcgccaugcgcgucaccaaggacacgaacgacaacaaccuguacaagcuccacgggggccacgugagcugccgggugaagcuguccgcccugacccucaagggcaccagcuacaagaucugcaccgacaagauguucuucgucaagaaccccacggacaccgggcacggcaccguggugaugcaggucaagguguccaagggggcgcccugccgcaucccggugaucgucgccgacgaccugaccgccgccaucaacaagggcauccuggugaccgugaacccgaucgccagcacgaacgacgacgagguccucaucgaggugaacccgcccuucggcgacuccuacaucaucguggggcggggcgacagccgccugaccuaccaguggcacaaggagggguccagcaucggcaagcuguucacccagaccaugaagggggucgagcggcuggcggugaugggcgacacggccugggacuucuccagcgccggcggguucuucaccuccgugggcaaggggauccacaccgucuucggcagcgccuuccaggggcuguucggcggccucaacuggaucaccaaggugaucaugggggccgugcugaucugggucggcaucaacacgcgcaacaugaccauguccaugagcaugauccucgugggggugaucaugauguuccugagccugggcgucggggcggaccagggcugcgccaucaacuucggcaagugaggacuaguaauaaggaaacuguaugaaugucugugggcaggaagugaagagauccuucuguaaagguuuuuggaauuaugucugcugaauaauaaacuuuuuugaaauaauaaaucugguagaaaaaugagaucuaaaaaaaaaaaaaaaaaaaaaaaaaaaaaaaaaaaaaaaaaaaaaaaaaaaaaaaaaaaaaaaaugcaucccccccccccccccccccccccccccccccaaaggcucuuuucagagccaccagaauu

SEQ ID NO: 1705 - RNA, 2416 nt, Artificial Sequence
  mRNA product Design b-4 comprising derived and/or modified sequence from YFV__NC_002031.1__X-SS-prMEdelstem_TM-JEV (polyprotein: aa92-681) (opt2)
gggagagucccgcagucggcguccagcggcucugcuuguucgugugugugucguugcaggccuuauucaagcuuaccaugcgcggccucuccucccgcaagcgccgcucccacgacguccucaccguccaguuccucauccucggcaugcuccucaugaccggcggcgucacccucguccgcaagaaccgcuggcuccuccucaacgucaccuccgaggaccucggcaagaccuucuccgucggcaccggcaacugcaccaccaacauccucgaggccaaguacuggugccccgacuccauggaguacaacugccccaaccucuccccccgcgaggagcccgacgacaucgacugcuggugcuacggcgucgagaacguccgcgucgccuacggcaagugcgacuccgccggccgcucccgccgcucccgccgcgccaucgaccuccccacccacgagaaccacggccucaagacccgccaggagaaguggaugaccggccgcaugggcgagcgccagcuccagaagaucgagcgcugguucguccgcaaccccuucuucgccgucaccgcccucaccaucgccuaccucgucggcuccaacaugacccagcgcgucgucaucgcccuccucguccucgccgucggccccgccuacuccgcccacugcaucggcaucaccgaccgcgacuucaucgagggcguccacggcggcaccugggucuccgccacccucgagcaggacaagugcgucaccgucauggcccccgacaagcccucccucgacaucucccucgagaccgucgccaucgaccgccccgccgagguccgcaaggucugcuacaacgccguccucacccacgucaagaucaacgacaagugccccuccaccggcgaggcccaccucgccgaggagaacgagggcgacaacgccugcaagcgcaccuacuccgaccgcggcuggggcaacggcugcggccucuucggcaagggcuccaucgucgccugcgccaaguucaccugcgccaaguccaugucccucuucgaggucgaccagaccaagauccaguacgucauccgcgcccagcuccacgucggcgccaagcaggagaacuggaacaccgacaucaagacccucaaguucgacgcccucuccggcucccaggaggucgaguucaucggcuacggcaaggccacccucgagugccagguccagaccgccgucgacuucggcaacuccuacaucgccgagauggagaccgaguccuggaucgucgaccgccagugggcccaggaccucacccuccccuggcaguccggcuccggcggcgucuggcgcgagaugcaccaccucgucgaguucgagcccccccacgccgccaccauccgcguccucgcccucggcaaccaggagggcucccucaagaccgcccucaccggcgccaugcgcgucaccaaggacaccaacgacaacaaccucuacaagcuccacggcggccacgucuccugccgcgucaagcucuccgcccucacccucaagggcaccuccuacaagaucugcaccgacaagauguucuucgucaagaaccccaccgacaccggccacggcaccgucgucaugcaggucaaggucuccaagggcgcccccugccgcauccccgucaucgucgccgacgaccucaccgccgccaucaacaagggcauccucgucaccgucaaccccaucgccuccaccaacgacgacgagguccucaucgaggucaacccccccuucggcgacuccuacaucaucgucggccgcggcgacucccgccucaccuaccaguggcacaaggagggcuccuccaucggcuccacccucggcaaggccuucuccaccacccucaagggcgcccagcgccucgccgcccucggcgacaccgccugggacuucggcuccaucggcggcgucuucaacuccaucggccgcgccguccaccaggucuucggcggcgccuuccgcacccucuucggcggcauguccuggaucacccagggccucaugggcgcccuccuccucuggaugggcgucaacgcccgcgaccgcuccaucgcccucgccuuccucgccaccggcggcguccucgucuuccucgccaccaacguccacgccugaggacuaguaauaaggaaacuguaugaaugucugugggcaggaagugaagagauccuucuguaaagguuuuuggaauuaugucugcugaauaauaaacuuuuuugaaauaauaaaucugguagaaaaaugagaucuaaaaaaaaaaaaaaaaaaaaaaaaaaaaaaaaaaaaaaaaaaaaaaaaaaaaaaaaaaaaaaaaugcaucccccccccccccccccccccccccccccccaaaggcucuuuucagagccaccagaauu

SEQ ID NO: 1706 - RNA, 2389 nt, Artificial Sequence
  mRNA product Design b-4 comprising derived and/or modified sequence from YFV__NC_002031.1__SSjev(V3)-prMEdelstem_TM-JEV (polyprotein: aa122-681) (opt2)
gggagagucccgcagucggcguccagcggcucugcuuguucgugugugugucguugcaggccuuauucaagcuuaccaugaacgagggcuccaucauguggcucgccucccucgccgucgucaucgccugcgccggcgccgucacccucguccgcaagaaccgcuggcuccuccucaacgucaccuccgaggaccucggcaagaccuucuccgucggcaccggcaacugcaccaccaacauccucgaggccaaguacuggugccccgacuccauggaguacaacugccccaaccucuccccccgcgaggagcccgacgacaucgacugcuggugcuacggcgucgagaacguccgcgucgccuacggcaagugcgacuccgccggccgcucccgccgcucccgccgcgccaucgaccuccccacccacgagaaccacggccucaagacccgccaggagaaguggaugaccggccgcaugggcgagcgccagcuccagaagaucgagcgcugguucguccgcaaccccuucuucgccgucaccgcccucaccaucgccuaccucgucggcuccaacaugacccagcgcgucgucaucgcccuccucguccucgccgucggccccgccuacuccgcccacugcaucggcaucaccgaccgcgacuucaucgagggcguccacggcggcaccugggucuccgccacccucgagcaggacaagugcgucaccgucauggcccccgacaagcccucccucgacaucucccucgagaccgucgccaucgaccgccccgccgagguccgcaaggucugcuacaacgccguccucacccacgucaagaucaacgacaagugccccuccaccggcgaggcccaccucgccgaggagaacgagggcgacaacgccugcaagcgcaccuacuccgaccgcggcuggggcaacggcugcggccucuucggcaagggcuccaucgucgccugcgccaaguucaccugcgccaaguccaugucccucuucgaggucgaccagaccaagauccaguacgucauccgcgcccagcuccacgucggcgccaagcaggagaacuggaacaccgacaucaagacccucaaguucgacgcccucuccggcucccaggaggucgaguucaucggcuacggcaaggccacccucgagugccagguccagaccgccgucgacuucggcaacuccuacaucgccgagauggagaccgaguccuggaucgucgaccgccagugggcccaggaccucacccuccccuggcaguccggcuccggcggcgucuggcgcgagaugcaccaccucgucgaguucgagcccccccacgccgccaccauccgcguccucgcccucggcaaccaggagggcucccucaagaccgcccucaccggcgccaugcgcgucaccaaggacaccaacgacaacaaccucuacaagcuccacggcggccacgucuccugccgcgucaagcucuccgcccucacccucaagggcaccuccuacaagaucugcaccgacaagauguucuucgucaagaaccccaccgacaccggccacggcaccgucgucaugcaggucaaggucuccaagggcgcccccugccgcauccccgucaucgucgccgacgaccucaccgccgccaucaacaagggcauccucgucaccgucaaccccaucgccuccaccaacgacgacgagguccucaucgaggucaacccccccuucggcgacuccuacaucaucgucggccgcggcgacucccgccucaccuaccaguggcacaaggagggcuccuccaucggcuccacccucggcaaggccuucuccaccacccucaagggcgcccagcgccucgccgcccucggcgacaccgccugggacuucggcuccaucggcggcgucuucaacuccaucggccgcgccguccaccaggucuucggcggcgccuuccgcacccucuucggcggcauguccuggaucacccagggccucaugggcgcccuccuccucuggaugggcgucaacgcccgcgaccgcuccaucgcccucgccuuccucgccaccggcggcguccucgucuuccucgccaccaacguccacgccugaggacuaguaauaaggaaacuguaugaaugucugugggcaggaagugaagagauccuucuguaaagguuuuuggaauuaugucugcugaauaauaaacuuuuuugaaauaauaaaucugguagaaaaaugagaucuaaaaaaaaaaaaaaaaaaaaaaaaaaaaaaaaaaaaaaaaaaaaaaaaaaaaaaaaaaaaaaaaugcaucccccccccccccccccccccccccccccccaaaggcucuuuucagagccaccagaauu

SEQ ID NO: 1707 - RNA, 2404 nt, Artificial Sequence
  mRNA product Design b-4 comprising derived and/or modified sequence from YFV__NC_002031.1__X-SS-prME (polyprotein: aa92-778) (opt2)
gggagagucccgcagucggcguccagcggcucugcuuguucgugugugugucguugcaggccuuauucaagcuuaccaugcgcggccucuccucccgcaagcgccgcucccacgacguccucaccguccaguuccucauccucggcaugcuccucaugaccggcggcgucacccucguccgcaagaaccgcuggcuccuccucaacgucaccuccgaggaccucggcaagaccuucuccgucggcaccggcaacugcaccaccaacauccucgaggccaaguacuggugccccgacuccauggaguacaacugccccaaccucuccccccgcgaggagcccgacgacaucgacugcuggugcuacggcgucgagaacguccgcgucgccuacggcaagugcgacuccgccggccgcucccgccgcucccgccgcgccaucgaccuccccacccacgagaaccacggccucaagacccgccaggagaaguggaugaccggccgcaugggcgagcgccagcuccagaagaucgagcgcugguucguccgcaaccccuucuucgccgucaccgcccucaccaucgccuaccucgucggcuccaacaugacccagcgcgucgucaucgcccuccucguccucgccgucggccccgccuacuccgcccacugcaucggcaucaccgaccgcgacuucaucgagggcguccacggcggcaccugggucuccgccacccucgagcaggacaagugcgucaccgucauggcccccgacaagcccucccucgacaucucccucgagaccgucgccaucgaccgccccgccgagguccgcaaggucugcuacaacgccguccucacccacgucaagaucaacgacaagugccccuccaccggcgaggcccaccucgccgaggagaacgagggcgacaacgccugcaagcgcaccuacuccgaccgcggcuggggcaacggcugcggccucuucggcaagggcuccaucgucgccugcgccaaguucaccugcgccaaguccaugucccucuucgaggucgaccagaccaagauccaguacgucauccgcgcccagcuccacgucggcgccaagcaggagaacuggaacaccgacaucaagacccucaaguucgacgcccucuccggcucccaggaggucgaguucaucggcuacggcaaggccacccucgagugccagguccagaccgccgucgacuucggcaacuccuacaucgccgagauggagaccgaguccuggaucgucgaccgccagugggcccaggaccucacccuccccuggcaguccggcuccggcggcgucuggcgcgagaugcaccaccucgucgaguucgagcccccccacgccgccaccauccgcguccucgcccucggcaaccaggagggcucccucaagaccgcccucaccggcgccaugcgcgucaccaaggacaccaacgacaacaaccucuacaagcuccacggcggccacgucuccugccgcgucaagcucuccgcccucacccucaagggcaccuccuacaagaucugcaccgacaagauguucuucgucaagaaccccaccgacaccggccacggcaccgucgucaugcaggucaaggucuccaagggcgcccccugccgcauccccgucaucgucgccgacgaccucaccgccgccaucaacaagggcauccucgucaccgucaaccccaucgccuccaccaacgacgacgagguccucaucgaggucaacccccccuucggcgacuccuacaucaucgucggccgcggcgacucccgccucaccuaccaguggcacaaggagggcuccuccaucggcaagcucuucacccagaccaugaagggcgucgagcgccucgccgucaugggcgacaccgccugggacuucuccuccgccggcggcuucuucaccuccgucggcaagggcauccacaccgucuucggcuccgccuuccagggccucuucggcggccucaacuggaucaccaaggucaucaugggcgccguccucaucugggucggcaucaacacccgcaacaugaccauguccauguccaugauccucgucggcgucaucaugauguuccucucccucggcgucggcgccugaggacuaguaauaaggaaacuguaugaaugucugugggcaggaagugaagagauccuucuguaaagguuuuuggaauuaugucugcugaauaauaaacuuuuuugaaauaauaaaucugguagaaaaaugagaucuaaaaaaaaaaaaaaaaaaaaaaaaaaaaaaaaaaaaaaaaaaaaaaaaaaaaaaaaaaaaaaaaugcaucccccccccccccccccccccccccccccccaaaggcucuuuucagagccaccagaauu

SEQ ID NO: 1708 - RNA, 2407 nt, Artificial Sequence
  mRNA product Design b-4 comprising derived and/or modified sequence from YFV__NC_002031.1__SSjev(V3)-prME-XX (polyprotein: aa122-788) (opt2)
gggagagucccgcagucggcguccagcggcucugcuuguucgugugugugucguugcaggccuuauucaagcuuaccaugaacgagggcuccaucauguggcucgccucccucgccgucgucaucgccugcgccggcgccgucacccucguccgcaagaaccgcuggcuccuccucaacgucaccuccgaggaccucggcaagaccuucuccgucggcaccggcaacugcaccaccaacauccucgaggccaaguacuggugccccgacuccauggaguacaacugccccaaccucuccccccgcgaggagcccgacgacaucgacugcuggugcuacggcgucgagaacguccgcgucgccuacggcaagugcgacuccgccggccgcucccgccgcucccgccgcgccaucgaccuccccacccacgagaaccacggccucaagacccgccaggagaaguggaugaccggccgcaugggcgagcgccagcuccagaagaucgagcgcugguucguccgcaaccccuucuucgccgucaccgcccucaccaucgccuaccucgucggcuccaacaugacccagcgcgucgucaucgcccuccucguccucgccgucggccccgccuacuccgcccacugcaucggcaucaccgaccgcgacuucaucgagggcguccacggcggcaccugggucuccgccacccucgagcaggacaagugcgucaccgucauggcccccgacaagcccucccucgacaucucccucgagaccgucgccaucgaccgccccgccgagguccgcaaggucugcuacaacgccguccucacccacgucaagaucaacgacaagugccccuccaccggcgaggcccaccucgccgaggagaacgagggcgacaacgccugcaagcgcaccuacuccgaccgcggcuggggcaacggcugcggccucuucggcaagggcuccaucgucgccugcgccaaguucaccugcgccaaguccaugucccucuucgaggucgaccagaccaagauccaguacgucauccgcgcccagcuccacgucggcgccaagcaggagaacuggaacaccgacaucaagacccucaaguucgacgcccucuccggcucccaggaggucgaguucaucggcuacggcaaggccacccucgagugccagguccagaccgccgucgacuucggcaacuccuacaucgccgagauggagaccgaguccuggaucgucgaccgccagugggcccaggaccucacccuccccuggcaguccggcuccggcggcgucuggcgcgagaugcaccaccucgucgaguucgagcccccccacgccgccaccauccgcguccucgcccucggcaaccaggagggcucccucaagaccgcccucaccggcgccaugcgcgucaccaaggacaccaacgacaacaaccucuacaagcuccacggcggccacgucuccugccgcgucaagcucuccgcccucacccucaagggcaccuccuacaagaucugcaccgacaagauguucuucgucaagaaccccaccgacaccggccacggcaccgucgucaugcaggucaaggucuccaagggcgcccccugccgcauccccgucaucgucgccgacgaccucaccgccgccaucaacaagggcauccucgucaccgucaaccccaucgccuccaccaacgacgacgagguccucaucgaggucaacccccccuucggcgacuccuacaucaucgucggccgcggcgacucccgccucaccuaccaguggcacaaggagggcuccuccaucggcaagcucuucacccagaccaugaagggcgucgagcgccucgccgucaugggcgacaccgccugggacuucuccuccgccggcggcuucuucaccuccgucggcaagggcauccacaccgucuucggcuccgccuuccagggccucuucggcggccucaacuggaucaccaaggucaucaugggcgccguccucaucugggucggcaucaacacccgcaacaugaccauguccauguccaugauccucgucggcgucaucaugauguuccucucccucggcgucggcgccgaccagggcugcgccaucaacuucggcaagugaggacuaguaauaaggaaacuguaugaaugucugugggcaggaagugaagagauccuucuguaaagguuuuuggaauuaugucugcugaauaauaaacuuuuuugaaauaauaaaucugguagaaaaaugagaucuaaaaaaaaaaaaaaaaaaaaaaaaaaaaaaaaaaaaaaaaaaaaaaaaaaaaaaaaaaaaaaaaugcaucccccccccccccccccccccccccccccccaaaggcucuuuucagagccaccagaauu

SEQ ID NO: 1709 - RNA, 2416 nt, Artificial Sequence
  mRNA product Design b-4 comprising derived and/or modified sequence from YFV__NC_002031.1__X-SS-prMEdelstem_TM-JEV (polyprotein: aa92-681) (opt3)
gggagagucccgcagucggcguccagcggcucugcuuguucgugugugugucguugcaggccuuauucaagcuuaccaugagaggccugagcuccaggaagcggcgcucucacgacgugcucaccguccaguuccuuauccuggggauguuguuaaugacaggagguguuacucuggugcguaaaaaccgauggcuacuccugaauguaacgucagaggaucuuggcaagaccuuuaguguggggacaggaaacugcacuaccaauauucuggaagccaaauacuggugucccgacagcauggaguauaacugcccuaauuuguccccaagagaggaaccggaugacauagauuguuggugcuacggcgucgaaaacgugaggguugcuuaugguaagugugacucugcagggcggucgcgcagaucaaggcgggccaucgaucuccccacacaugagaaucacggacugaaaacccgccaagagaaguggaugacuggccgaaugggcgaaagacagcugcagaagauugagaggugguucgugcggaacccuuucuucgcggucacagcucucaccaucgccuacuuaguggggagcaauaugacgcagcguguaguuauugcacugcuuguguuggccgucggaccagcuuauagugcacauugcaucgguauaacugaccgcgauuuuaucgaaggcgugcacgggggaaccuggguguccgccacacuggagcaagacaaaugugucacuguuauggcucccgauaagccuucucuagacauuagccucgagaccguggccaucgauagaccagcggaaguaaggaaagugugcuacaacgcaguccugacacaugugaagauuaaugacaaaugucccuccaccggcgaggcccaccuugcugaagagaacgaaggugacaaugccugcaagcggacguauucagaucgaggguggggaaacggcuguggccuguucgggaagggaaguaucguugcaugcgcuaaauuuacuugcgccaagagcaugucuuuguucgagguggaccagacaaaaauacaguacgucauucgcgcgcagcuccacgugggugccaagcaagagaauuggaacaccgauaucaaaacucugaaguuugacgcauuauccggcucacaggaaguagaguucauuggguacggaaaagcuacacuggaaugucagguucagaccgccguggauuuuggcaacagcuauaucgcugagauggaaacggagaguuggaucgucgacagacaaugggcccaggaucucacccuuccuuggcagucugguuccgggggcguguggagggagaugcaucaccuggucgaauuugagccaccgcaugcagccacaauucggguguuggcucuaggaaaucaagaaggcagccugaagacugcgcucaccggggcaaugcgcguuacaaaggacacuaacgauaauaaccuguacaaacuucacggaggucacgugucgugcagaguaaagcugucugccuugacccucaaaggcacauccuauaagauauguaccgacaaaauguuuuucgucaagaaucccacugauacggggcauggaacagugguuaugcaagugaaggucucaaaaggcgcuccuugcaggaucccagugauuguagccgacgaccugaccgcagccaucaacaaggguauauuagugacuguuaaucccauugcuaguaccaacgaugacgagguccugaucgaagugaauccuccauucggggauagcuacaucauugugggccguggagacucccggcuaacauaucaguggcacaaagagggcucuagcaucggcagcacccuggggaaggccuucuccacaacucucaaaggagcucagagacuugcagcccugggugacacggcgugggauuuuggcucuaucgggggaguguucaacucaauuggcagggcuguccaccaaguuuuugguggggccuuccggaccuuguuuggaggcaugaguuggauaacacagggcuuaaugggggcacugcuacucuggaugggagugaaugcccgcgaccgaagcaucgcucuggcauuccuugccacugguggcguacugguguuuuuggcuaccaacguccaugccugaggacuaguaauaaggaaacuguaugaaugucugugggcaggaagugaagagauccuucuguaaagguuuuuggaauuaugucugcugaauaauaaacuuuuuugaaauaauaaaucugguagaaaaaugagaucuaaaaaaaaaaaaaaaaaaaaaaaaaaaaaaaaaaaaaaaaaaaaaaaaaaaaaaaaaaaaaaaaugcaucccccccccccccccccccccccccccccccaaaggcucuuuucagagccaccagaauu

SEQ ID NO: 1710 - RNA, 2389 nt, Artificial Sequence
  mRNA product Design b-4 comprising derived and/or modified sequence from YFV__NC_002031.1__SSjev(V3)-prMEdelstem_TM-JEV (polyprotein: aa122-681) (opt3)
gggagagucccgcagucggcguccagcggcucugcuuguucgugugugugucguugcaggccuuauucaagcuuaccaugaacgagggcagcaucauguggcuggccucccucgcuguggucauugcaugcgccggggcgguuacucuggugcguaaaaaccgauggcuacuccugaauguaacgucagaggaucuuggcaagaccuuuaguguggggacaggaaacugcacuaccaauauucuggaagccaaauacuggugucccgacagcauggaguauaacugcccuaauuuguccccaagagaggaaccggaugacauagauuguuggugcuacggcgucgaaaacgugaggguugcuuaugguaagugugacucugcagggcggucgcgcagaucaaggcgggccaucgaucuccccacacaugagaaucacggacugaaaacccgccaagagaaguggaugacuggccgaaugggcgaaagacagcugcagaagauugagaggugguucgugcggaacccuuucuucgcggucacagcucucaccaucgccuacuuaguggggagcaauaugacgcagcguguaguuauugcacugcuuguguuggccgucggaccagcuuauagugcacauugcaucgguauaacugaccgcgauuuuaucgaaggcgugcacgggggaaccuggguguccgccacacuggagcaagacaaaugugucacuguuauggcucccgauaagccuucucuagacauuagccucgagaccguggccaucgauagaccagcggaaguaaggaaagugugcuacaacgcaguccugacacaugugaagauuaaugacaaaugucccuccaccggcgaggcccaccuugcugaagagaacgaaggugacaaugccugcaagcggacguauucagaucgaggguggggaaacggcuguggccuguucgggaagggaaguaucguugcaugcgcuaaauuuacuugcgccaagagcaugucuuuguucgagguggaccagacaaaaauacaguacgucauucgcgcgcagcuccacgugggugccaagcaagagaauuggaacaccgauaucaaaacucugaaguuugacgcauuauccggcucacaggaaguagaguucauuggguacggaaaagcuacacuggaaugucagguucagaccgccguggauuuuggcaacagcuauaucgcugagauggaaacggagaguuggaucgucgacagacaaugggcccaggaucucacccuuccuuggcagucugguuccgggggcguguggagggagaugcaucaccuggucgaauuugagccaccgcaugcagccacaauucggguguuggcucuaggaaaucaagaaggcagccugaagacugcgcucaccggggcaaugcgcguuacaaaggacacuaacgauaauaaccuguacaaacuucacggaggucacgugucgugcagaguaaagcugucugccuugacccucaaaggcacauccuauaagauauguaccgacaaaauguuuuucgucaagaaucccacugauacggggcauggaacagugguuaugcaagugaaggucucaaaaggcgcuccuugcaggaucccagugauuguagccgacgaccugaccgcagccaucaacaaggguauauuagugacuguuaaucccauugcuaguaccaacgaugacgagguccugaucgaagugaauccuccauucggggauagcuacaucauugugggccguggagacucccggcuaacauaucaguggcacaaagagggcucuagcaucggcagcacccuggggaaggccuucuccacaacucucaaaggagcucagagacuugcagcccugggugacacggcgugggauuuuggcucuaucgggggaguguucaacucaauuggcagggcuguccaccaaguuuuugguggggccuuccggaccuuguuuggaggcaugaguuggauaacacagggcuuaaugggggcacugcuacucuggaugggagugaaugcccgcgaccgaagcaucgcucuggcauuccuugccacugguggcguacugguguuuuuggcuaccaacguccaugccugaggacuaguaauaaggaaacuguaugaaugucugugggcaggaagugaagagauccuucuguaaagguuuuuggaauuaugucugcugaauaauaaacuuuuuugaaauaauaaaucugguagaaaaaugagaucuaaaaaaaaaaaaaaaaaaaaaaaaaaaaaaaaaaaaaaaaaaaaaaaaaaaaaaaaaaaaaaaaugcaucccccccccccccccccccccccccccccccaaaggcucuuuucagagccaccagaauu

SEQ ID NO: 1711 - RNA, 2404 nt, Artificial Sequence
  mRNA product Design b-4 comprising derived and/or modified sequence from YFV__NC_002031.1__X-SS-prME (polyprotein: aa92-778) (opt3)
gggagagucccgcagucggcguccagcggcucugcuuguucgugugugugucguugcaggccuuauucaagcuuaccaugagaggccugagcuccaggaagcggcgcucucacgacgugcucaccguccaguuccuuauccuggggauguuguuaaugacaggagguguuacucuggugcguaaaaaccgauggcuacuccugaauguaacgucagaggaucuuggcaagaccuuuaguguggggacaggaaacugcacuaccaauauucuggaagccaaauacuggugucccgacagcauggaguauaacugcccuaauuuguccccaagagaggaaccggaugacauagauuguuggugcuacggcgucgaaaacgugaggguugcuuaugguaagugugacucugcagggcggucgcgcagaucaaggcgggccaucgaucuccccacacaugagaaucacggacugaaaacccgccaagagaaguggaugacuggccgaaugggcgaaagacagcugcagaagauugagaggugguucgugcggaacccuuucuucgcggucacagcucucaccaucgccuacuuaguggggagcaauaugacgcagcguguaguuauugcacugcuuguguuggccgucggaccagcuuauagugcacauugcaucgguauaacugaccgcgauuuuaucgaaggcgugcacgggggaaccuggguguccgccacacuggagcaagacaaaugugucacuguuauggcucccgauaagccuucucuagacauuagccucgagaccguggccaucgauagaccagcggaaguaaggaaagugugcuacaacgcaguccugacacaugugaagauuaaugacaaaugucccuccaccggcgaggcccaccuugcugaagagaacgaaggugacaaugccugcaagcggacguauucagaucgaggguggggaaacggcuguggccuguucgggaagggaaguaucguugcaugcgcuaaauuuacuugcgccaagagcaugucuuuguucgagguggaccagacaaaaauacaguacgucauucgcgcgcagcuccacgugggugccaagcaagagaauuggaacaccgauaucaaaacucugaaguuugacgcauuauccggcucacaggaaguagaguucauuggguacggaaaagcuacacuggaaugucagguucagaccgccguggauuuuggcaacagcuauaucgcugagauggaaacggagaguuggaucgucgacagacaaugggcccaggaucucacccuuccuuggcagucugguuccgggggcguguggagggagaugcaucaccuggucgaauuugagccaccgcaugcagccacaauucggguguuggcucuaggaaaucaagaaggcagccugaagacugcgcucaccggggcaaugcgcguuacaaaggacacuaacgauaauaaccuguacaaacuucacggaggucacgugucgugcagaguaaagcugucugccuugacccucaaaggcacauccuauaagauauguaccgacaaaauguuuuucgucaagaaucccacugauacggggcauggaacagugguuaugcaagugaaggucucaaaaggcgcuccuugcaggaucccagugauuguagccgacgaccugaccgcagccaucaacaaggguauauuagugacuguuaaucccauugcuaguaccaacgaugacgagguccugaucgaagugaauccuccauucggggauagcuacaucauugugggccguggagacucccggcuaacauaucaguggcacaaagagggcucuagcaucgggaagcucuuuacccagacuaugaaaggagucgagcgacuggccguuaugggugauacagcaugggacuucucaagugcgggcggguuuuucacguccgugggaaagggcauucauaccguguuugguagcgcuuuccaggggcuuuuuggcggauugaacuggauaacuaagguaaucaugggcgccguccugauuuggguggggaucaauacaagaaacaugaccaugucuaugucaaugauccucguuggagugauuaugauguuccugagucuuggcgucggugcaugaggacuaguaauaaggaaacuguaugaaugucugugggcaggaagugaagagauccuucuguaaagguuuuuggaauuaugucugcugaauaauaaacuuuuuugaaauaauaaaucugguagaaaaaugagaucuaaaaaaaaaaaaaaaaaaaaaaaaaaaaaaaaaaaaaaaaaaaaaaaaaaaaaaaaaaaaaaaaugcaucccccccccccccccccccccccccccccccaaaggcucuuuucagagccaccagaauu

SEQ ID NO: 1712 - RNA, 2407 nt, Artificial Sequence
  mRNA product Design b-4 comprising derived and/or modified sequence from YFV__NC_002031.1__SSjev(V3)-prME-XX (polyprotein: aa122-788) (opt3)
gggagagucccgcagucggcguccagcggcucugcuuguucgugugugugucguugcaggccuuauucaagcuuaccaugaacgagggcagcaucauguggcuggccucccucgcuguggucauugcaugcgccggggcgguuacucuggugcguaaaaaccgauggcuacuccugaauguaacgucagaggaucuuggcaagaccuuuaguguggggacaggaaacugcacuaccaauauucuggaagccaaauacuggugucccgacagcauggaguauaacugcccuaauuuguccccaagagaggaaccggaugacauagauuguuggugcuacggcgucgaaaacgugaggguugcuuaugguaagugugacucugcagggcggucgcgcagaucaaggcgggccaucgaucuccccacacaugagaaucacggacugaaaacccgccaagagaaguggaugacuggccgaaugggcgaaagacagcugcagaagauugagaggugguucgugcggaacccuuucuucgcggucacagcucucaccaucgccuacuuaguggggagcaauaugacgcagcguguaguuauugcacugcuuguguuggccgucggaccagcuuauagugcacauugcaucgguauaacugaccgcgauuuuaucgaaggcgugcacgggggaaccuggguguccgccacacuggagcaagacaaaugugucacuguuauggcucccgauaagccuucucuagacauuagccucgagaccguggccaucgauagaccagcggaaguaaggaaagugugcuacaacgcaguccugacacaugugaagauuaaugacaaaugucccuccaccggcgaggcccaccuugcugaagagaacgaaggugacaaugccugcaagcggacguauucagaucgaggguggggaaacggcuguggccuguucgggaagggaaguaucguugcaugcgcuaaauuuacuugcgccaagagcaugucuuuguucgagguggaccagacaaaaauacaguacgucauucgcgcgcagcuccacgugggugccaagcaagagaauuggaacaccgauaucaaaacucugaaguuugacgcauuauccggcucacaggaaguagaguucauuggguacggaaaagcuacacuggaaugucagguucagaccgccguggauuuuggcaacagcuauaucgcugagauggaaacggagaguuggaucgucgacagacaaugggcccaggaucucacccuuccuuggcagucugguuccgggggcguguggagggagaugcaucaccuggucgaauuugagccaccgcaugcagccacaauucggguguuggcucuaggaaaucaagaaggcagccugaagacugcgcucaccggggcaaugcgcguuacaaaggacacuaacgauaauaaccuguacaaacuucacggaggucacgugucgugcagaguaaagcugucugccuugacccucaaaggcacauccuauaagauauguaccgacaaaauguuuuucgucaagaaucccacugauacggggcauggaacagugguuaugcaagugaaggucucaaaaggcgcuccuugcaggaucccagugauuguagccgacgaccugaccgcagccaucaacaaggguauauuagugacuguuaaucccauugcuaguaccaacgaugacgagguccugaucgaagugaauccuccauucggggauagcuacaucauugugggccguggagacucccggcuaacauaucaguggcacaaagagggcucuagcaucgggaagcucuuuacccagacuaugaaaggagucgagcgacuggccguuaugggugauacagcaugggacuucucaagugcgggcggguuuuucacguccgugggaaagggcauucauaccguguuugguagcgcuuuccaggggcuuuuuggcggauugaacuggauaacuaagguaaucaugggcgccguccugauuuggguggggaucaauacaagaaacaugaccaugucuaugucaaugauccucguuggagugauuaugauguuccugagucuuggcgucggugcagaucaggggugugccauaaauuuuggaaaaugaggacuaguaauaaggaaacuguaugaaugucugugggcaggaagugaagagauccuucuguaaagguuuuuggaauuaugucugcugaauaauaaacuuuuuugaaauaauaaaucugguagaaaaaugagaucuaaaaaaaaaaaaaaaaaaaaaaaaaaaaaaaaaaaaaaaaaaaaaaaaaaaaaaaaaaaaaaaaugcaucccccccccccccccccccccccccccccccaaaggcucuuuucagagccaccagaauu

SEQ ID NO: 1713 - RNA, 2416 nt, Artificial Sequence
  mRNA product Design b-4 comprising derived and/or modified sequence from YFV__NC_002031.1__X-SS-prMEdelstem_TM-JEV (polyprotein: aa92-681) (opt4)
gggagagucccgcagucggcguccagcggcucugcuuguucgugugugugucguugcaggccuuauucaagcuuaccaugagaggccugagcagcagaaagagaagaagccacgacgugcugaccgugcaguuccugauccugggcaugcugcugaugaccggcggcgugacccuggugagaaagaacagauggcugcugcugaacgugaccagcgaggaccugggcaagaccuucagcgugggcaccggcaacugcaccaccaacauccuggaggccaaguacuggugccccgacagcauggaguacaacugccccaaccugagccccagagaggagcccgacgacaucgacugcuggugcuacggcguggagaacgugagaguggccuacggcaagugcgacagcgccggcagaagcagaagaagcagaagagccaucgaccugcccacccacgagaaccacggccugaagaccagacaggagaaguggaugaccggcagaaugggcgagagacagcugcagaagaucgagagaugguucgugagaaaccccuucuucgccgugaccgcccugaccaucgccuaccuggugggcagcaacaugacccagagaguggugaucgcccugcuggugcuggccgugggccccgccuacagcgcccacugcaucggcaucaccgacagagacuucaucgagggcgugcacggcggcaccugggugagcgccacccuggagcaggacaagugcgugaccgugauggcccccgacaagcccagccuggacaucagccuggagaccguggccaucgacagacccgccgaggugagaaaggugugcuacaacgccgugcugacccacgugaagaucaacgacaagugccccagcaccggcgaggcccaccuggccgaggagaacgagggcgacaacgccugcaagagaaccuacagcgacagaggcuggggcaacggcugcggccuguucggcaagggcagcaucguggccugcgccaaguucaccugcgccaagagcaugagccuguucgagguggaccagaccaagauccaguacgugaucagagcccagcugcacgugggcgccaagcaggagaacuggaacaccgacaucaagacccugaaguucgacgcccugagcggcagccaggagguggaguucaucggcuacggcaaggccacccuggagugccaggugcagaccgccguggacuucggcaacagcuacaucgccgagauggagaccgagagcuggaucguggacagacagugggcccaggaccugacccugcccuggcagagcggcagcggcggcguguggagagagaugcaccaccugguggaguucgagcccccccacgccgccaccaucagagugcuggcccugggcaaccaggagggcagccugaagaccgcccugaccggcgccaugagagugaccaaggacaccaacgacaacaaccuguacaagcugcacggcggccacgugagcugcagagugaagcugagcgcccugacccugaagggcaccagcuacaagaucugcaccgacaagauguucuucgugaagaaccccaccgacaccggccacggcaccguggugaugcaggugaaggugagcaagggcgcccccugcagaauccccgugaucguggccgacgaccugaccgccgccaucaacaagggcauccuggugaccgugaaccccaucgccagcaccaacgacgacgaggugcugaucgaggugaacccccccuucggcgacagcuacaucaucgugggcagaggcgacagcagacugaccuaccaguggcacaaggagggcagcagcaucggcagcacccugggcaaggccuucagcaccacccugaagggcgcccagagacuggccgcccugggcgacaccgccugggacuucggcagcaucggcggcguguucaacagcaucggcagagccgugcaccagguguucggcggcgccuucagaacccuguucggcggcaugagcuggaucacccagggccugaugggcgcccugcugcuguggaugggcgugaacgccagagacagaagcaucgcccuggccuuccuggccaccggcggcgugcugguguuccuggccaccaacgugcacgccugaggacuaguaauaaggaaacuguaugaaugucugugggcaggaagugaagagauccuucuguaaagguuuuuggaauuaugucugcugaauaauaaacuuuuuugaaauaauaaaucugguagaaaaaugagaucuaaaaaaaaaaaaaaaaaaaaaaaaaaaaaaaaaaaaaaaaaaaaaaaaaaaaaaaaaaaaaaaaugcaucccccccccccccccccccccccccccccccaaaggcucuuuucagagccaccagaauu

SEQ ID NO: 1714 - RNA, 2389 nt, Artificial Sequence
  mRNA product Design b-4 comprising derived and/or modified sequence from YFV__NC_002031.1__SSjev(V3)-prMEdelstem_TM-JEV (polyprotein: aa122-681) (opt4)
gggagagucccgcagucggcguccagcggcucugcuuguucgugugugugucguugcaggccuuauucaagcuuaccaugaacgagggcagcaucauguggcuggccagccuggccguggugaucgccugcgccggcgccgugacccuggugagaaagaacagauggcugcugcugaacgugaccagcgaggaccugggcaagaccuucagcgugggcaccggcaacugcaccaccaacauccuggaggccaaguacuggugccccgacagcauggaguacaacugccccaaccugagccccagagaggagcccgacgacaucgacugcuggugcuacggcguggagaacgugagaguggccuacggcaagugcgacagcgccggcagaagcagaagaagcagaagagccaucgaccugcccacccacgagaaccacggccugaagaccagacaggagaaguggaugaccggcagaaugggcgagagacagcugcagaagaucgagagaugguucgugagaaaccccuucuucgccgugaccgcccugaccaucgccuaccuggugggcagcaacaugacccagagaguggugaucgcccugcuggugcuggccgugggccccgccuacagcgcccacugcaucggcaucaccgacagagacuucaucgagggcgugcacggcggcaccugggugagcgccacccuggagcaggacaagugcgugaccgugauggcccccgacaagcccagccuggacaucagccuggagaccguggccaucgacagacccgccgaggugagaaaggugugcuacaacgccgugcugacccacgugaagaucaacgacaagugccccagcaccggcgaggcccaccuggccgaggagaacgagggcgacaacgccugcaagagaaccuacagcgacagaggcuggggcaacggcugcggccuguucggcaagggcagcaucguggccugcgccaaguucaccugcgccaagagcaugagccuguucgagguggaccagaccaagauccaguacgugaucagagcccagcugcacgugggcgccaagcaggagaacuggaacaccgacaucaagacccugaaguucgacgcccugagcggcagccaggagguggaguucaucggcuacggcaaggccacccuggagugccaggugcagaccgccguggacuucggcaacagcuacaucgccgagauggagaccgagagcuggaucguggacagacagugggcccaggaccugacccugcccuggcagagcggcagcggcggcguguggagagagaugcaccaccugguggaguucgagcccccccacgccgccaccaucagagugcuggcccugggcaaccaggagggcagccugaagaccgcccugaccggcgccaugagagugaccaaggacaccaacgacaacaaccuguacaagcugcacggcggccacgugagcugcagagugaagcugagcgcccugacccugaagggcaccagcuacaagaucugcaccgacaagauguucuucgugaagaaccccaccgacaccggccacggcaccguggugaugcaggugaaggugagcaagggcgcccccugcagaauccccgugaucguggccgacgaccugaccgccgccaucaacaagggcauccuggugaccgugaaccccaucgccagcaccaacgacgacgaggugcugaucgaggugaacccccccuucggcgacagcuacaucaucgugggcagaggcgacagcagacugaccuaccaguggcacaaggagggcagcagcaucggcagcacccugggcaaggccuucagcaccacccugaagggcgcccagagacuggccgcccugggcgacaccgccugggacuucggcagcaucggcggcguguucaacagcaucggcagagccgugcaccagguguucggcggcgccuucagaacccuguucggcggcaugagcuggaucacccagggccugaugggcgcccugcugcuguggaugggcgugaacgccagagacagaagcaucgcccuggccuuccuggccaccggcggcgugcugguguuccuggccaccaacgugcacgccugaggacuaguaauaaggaaacuguaugaaugucugugggcaggaagugaagagauccuucuguaaagguuuuuggaauuaugucugcugaauaauaaacuuuuuugaaauaauaaaucugguagaaaaaugagaucuaaaaaaaaaaaaaaaaaaaaaaaaaaaaaaaaaaaaaaaaaaaaaaaaaaaaaaaaaaaaaaaaugcaucccccccccccccccccccccccccccccccaaaggcucuuuucagagccaccagaauu

SEQ ID NO: 1715 - RNA, 2404 nt, Artificial Sequence
  mRNA product Design b-4 comprising derived and/or modified sequence from YFV__NC_002031.1__X-SS-prME (polyprotein: aa92-778) (opt4)
gggagagucccgcagucggcguccagcggcucugcuuguucgugugugugucguugcaggccuuauucaagcuuaccaugagaggccugagcagcagaaagagaagaagccacgacgugcugaccgugcaguuccugauccugggcaugcugcugaugaccggcggcgugacccuggugagaaagaacagauggcugcugcugaacgugaccagcgaggaccugggcaagaccuucagcgugggcaccggcaacugcaccaccaacauccuggaggccaaguacuggugccccgacagcauggaguacaacugccccaaccugagccccagagaggagcccgacgacaucgacugcuggugcuacggcguggagaacgugagaguggccuacggcaagugcgacagcgccggcagaagcagaagaagcagaagagccaucgaccugcccacccacgagaaccacggccugaagaccagacaggagaaguggaugaccggcagaaugggcgagagacagcugcagaagaucgagagaugguucgugagaaaccccuucuucgccgugaccgcccugaccaucgccuaccuggugggcagcaacaugacccagagaguggugaucgcccugcuggugcuggccgugggccccgccuacagcgcccacugcaucggcaucaccgacagagacuucaucgagggcgugcacggcggcaccugggugagcgccacccuggagcaggacaagugcgugaccgugauggcccccgacaagcccagccuggacaucagccuggagaccguggccaucgacagacccgccgaggugagaaaggugugcuacaacgccgugcugacccacgugaagaucaacgacaagugccccagcaccggcgaggcccaccuggccgaggagaacgagggcgacaacgccugcaagagaaccuacagcgacagaggcuggggcaacggcugcggccuguucggcaagggcagcaucguggccugcgccaaguucaccugcgccaagagcaugagccuguucgagguggaccagaccaagauccaguacgugaucagagcccagcugcacgugggcgccaagcaggagaacuggaacaccgacaucaagacccugaaguucgacgcccugagcggcagccaggagguggaguucaucggcuacggcaaggccacccuggagugccaggugcagaccgccguggacuucggcaacagcuacaucgccgagauggagaccgagagcuggaucguggacagacagugggcccaggaccugacccugcccuggcagagcggcagcggcggcguguggagagagaugcaccaccugguggaguucgagcccccccacgccgccaccaucagagugcuggcccugggcaaccaggagggcagccugaagaccgcccugaccggcgccaugagagugaccaaggacaccaacgacaacaaccuguacaagcugcacggcggccacgugagcugcagagugaagcugagcgcccugacccugaagggcaccagcuacaagaucugcaccgacaagauguucuucgugaagaaccccaccgacaccggccacggcaccguggugaugcaggugaaggugagcaagggcgcccccugcagaauccccgugaucguggccgacgaccugaccgccgccaucaacaagggcauccuggugaccgugaaccccaucgccagcaccaacgacgacgaggugcugaucgaggugaacccccccuucggcgacagcuacaucaucgugggcagaggcgacagcagacugaccuaccaguggcacaaggagggcagcagcaucggcaagcuguucacccagaccaugaagggcguggagagacuggccgugaugggcgacaccgccugggacuucagcagcgccggcggcuucuucaccagcgugggcaagggcauccacaccguguucggcagcgccuuccagggccuguucggcggccugaacuggaucaccaaggugaucaugggcgccgugcugaucugggugggcaucaacaccagaaacaugaccaugagcaugagcaugauccuggugggcgugaucaugauguuccugagccugggcgugggcgccugaggacuaguaauaaggaaacuguaugaaugucugugggcaggaagugaagagauccuucuguaaagguuuuuggaauuaugucugcugaauaauaaacuuuuuugaaauaauaaaucugguagaaaaaugagaucuaaaaaaaaaaaaaaaaaaaaaaaaaaaaaaaaaaaaaaaaaaaaaaaaaaaaaaaaaaaaaaaaugcaucccccccccccccccccccccccccccccccaaaggcucuuuucagagccaccagaauu

SEQ ID NO: 1716 - RNA, 2407 nt, Artificial Sequence
  mRNA product Design b-4 comprising derived and/or modified sequence from YFV__NC_002031.1__SSjev(V3)-prME-XX (polyprotein: aa122-788) (opt4)
gggagagucccgcagucggcguccagcggcucugcuuguucgugugugugucguugcaggccuuauucaagcuuaccaugaacgagggcagcaucauguggcuggccagccuggccguggugaucgccugcgccggcgccgugacccuggugagaaagaacagauggcugcugcugaacgugaccagcgaggaccugggcaagaccuucagcgugggcaccggcaacugcaccaccaacauccuggaggccaaguacuggugccccgacagcauggaguacaacugccccaaccugagccccagagaggagcccgacgacaucgacugcuggugcuacggcguggagaacgugagaguggccuacggcaagugcgacagcgccggcagaagcagaagaagcagaagagccaucgaccugcccacccacgagaaccacggccugaagaccagacaggagaaguggaugaccggcagaaugggcgagagacagcugcagaagaucgagagaugguucgugagaaaccccuucuucgccgugaccgcccugaccaucgccuaccuggugggcagcaacaugacccagagaguggugaucgcccugcuggugcuggccgugggccccgccuacagcgcccacugcaucggcaucaccgacagagacuucaucgagggcgugcacggcggcaccugggugagcgccacccuggagcaggacaagugcgugaccgugauggcccccgacaagcccagccuggacaucagccuggagaccguggccaucgacagacccgccgaggugagaaaggugugcuacaacgccgugcugacccacgugaagaucaacgacaagugccccagcaccggcgaggcccaccuggccgaggagaacgagggcgacaacgccugcaagagaaccuacagcgacagaggcuggggcaacggcugcggccuguucggcaagggcagcaucguggccugcgccaaguucaccugcgccaagagcaugagccuguucgagguggaccagaccaagauccaguacgugaucagagcccagcugcacgugggcgccaagcaggagaacuggaacaccgacaucaagacccugaaguucgacgcccugagcggcagccaggagguggaguucaucggcuacggcaaggccacccuggagugccaggugcagaccgccguggacuucggcaacagcuacaucgccgagauggagaccgagagcuggaucguggacagacagugggcccaggaccugacccugcccuggcagagcggcagcggcggcguguggagagagaugcaccaccugguggaguucgagcccccccacgccgccaccaucagagugcuggcccugggcaaccaggagggcagccugaagaccgcccugaccggcgccaugagagugaccaaggacaccaacgacaacaaccuguacaagcugcacggcggccacgugagcugcagagugaagcugagcgcccugacccugaagggcaccagcuacaagaucugcaccgacaagauguucuucgugaagaaccccaccgacaccggccacggcaccguggugaugcaggugaaggugagcaagggcgcccccugcagaauccccgugaucguggccgacgaccugaccgccgccaucaacaagggcauccuggugaccgugaaccccaucgccagcaccaacgacgacgaggugcugaucgaggugaacccccccuucggcgacagcuacaucaucgugggcagaggcgacagcagacugaccuaccaguggcacaaggagggcagcagcaucggcaagcuguucacccagaccaugaagggcguggagagacuggccgugaugggcgacaccgccugggacuucagcagcgccggcggcuucuucaccagcgugggcaagggcauccacaccguguucggcagcgccuuccagggccuguucggcggccugaacuggaucaccaaggugaucaugggcgccgugcugaucugggugggcaucaacaccagaaacaugaccaugagcaugagcaugauccuggugggcgugaucaugauguuccugagccugggcgugggcgccgaccagggcugcgccaucaacuucggcaagugaggacuaguaauaaggaaacuguaugaaugucugugggcaggaagugaagagauccuucuguaaagguuuuuggaauuaugucugcugaauaauaaacuuuuuugaaauaauaaaucugguagaaaaaugagaucuaaaaaaaaaaaaaaaaaaaaaaaaaaaaaaaaaaaaaaaaaaaaaaaaaaaaaaaaaaaaaaaaugcaucccccccccccccccccccccccccccccccaaaggcucuuuucagagccaccagaauu

SEQ ID NO: 1717 - RNA, 2416 nt, Artificial Sequence
  mRNA product Design b-4 comprising derived and/or modified sequence from YFV__NC_002031.1__X-SS-prMEdelstem_TM-JEV (polyprotein: aa92-681) (opt5)
gggagagucccgcagucggcguccagcggcucugcuuguucgugugugugucguugcaggccuuauucaagcuuaccaugagaggccugagcucccggaagcgcagaucucacgacgugcucaccguccaguuccugauccuugggaugcugcucaugacaggaggcguuacgcuggugcggaaaaaccgcuggcuucugcucaaugugaccagcgaggaucuggggaagacauuuuccgucggaaccggcaacugcacaaccaauauucuggaagccaaauacuggugucccgacucuauggaguauaacugcccuaaucucagcccgagagaagaacccgaugacaucgauuguuggugcuacgggguggaaaacguucggguggcuuauggaaagugugacuccgccggccgcucuagacggagccgcagagcgauugaucugccuacacaugagaaucacggccuuaaaacccggcaagagaaguggaugacggggcgcaugggagaaagacagcugcagaagaucgagcggugguucguccgcaaccccuuuuucgcugugaccgcccucacaauugccuaccugguuggcuccaauaugacccagagaguggucaucgcccuucuggugcucgcuguggggccugcuuauagcgcccauugcaucggaauuacagaccgggauuuuaucgaaggcguccacgggggaaccuggguuucugcgacgcuggagcaagacaaaugugugacagugauggcccccgauaagccuucccuggacauuagccucgagaccgucgcuaucgauagaccggccgaagugcgcaaaguuugcuacaacgcugugcugacacaugucaagauuaaugacaaaugucccucuaccggcgaggcccaccuugcggaagagaacgaaggcgacaaugccugcaagcggaccuauuccgauagaggguggggaaacggcugugggcuguucggaaagggcagcaucguggcuugcgccaaauuuacaugcgcuaagucuaugucccucuucgagguugaccagacgaaaauucaguacgugauccgcgcccagcugcacgucggggccaagcaagagaauuggaacaccgauaucaaaacacuuaaguuugacgcucugagcggaucccaggaaguggaguucauuggcuacggcaaagcgacccucgaaugucagguccagacagccguggauuuugggaacucuuauaucgcugagauggaaaccgagagcuggauuguugaccggcaaugggcccaggaucugacgcugccuuggcaguccggaagcggcgggguguggagagagaugcaucaccucgucgaguucgagcccccucaugccgcuacaauccgcgugcuggcccuuggaaaucaagaaggcucucugaagaccgcgcucaccggggcuaugcggguuacaaaggacaccaacgauaauaaccuguacaaacuucacggcggacacguguccugcagagucaagcugagcgcccucacacugaaaggcacgucuuauaagauuuguaccgacaaaauguuuuucgugaagaaucccacagauaccgggcauggaacagugguuaugcaggucaaggugagcaaaggcgccccgugccgcaucccugugaucgucgcugacgaccugaccgccgcuauuaacaaggggauccucgugacgguuaaucccauugccuccaccaacgaugacgaggugcugaucgaagucaauccucccuucggagauucuuacauuaucgugggccggggagacagcagacuuacauaucaguggcacaaagagggcuccagcaucggcagcacccuggggaaggccuucuccacaacgcucaaaggagcucagagacuggccgcgcuuggcgacaccgcuugggauuuugggucuaucggaggcguguucaacagcauugggcgggccguccaccaaguuuuuggaggcgccuuccgcacacuguuuggcgggauguccuggaucacccagggacucaugggcgcucugcuucuguggaugggggugaaugccagagaccggucuauugcucucgccuuccuggcgacaggaggcgugcuggucuuucucgccaccaacgugcaugcuugaggacuaguaauaaggaaacuguaugaaugucugugggcaggaagugaagagauccuucuguaaagguuuuuggaauuaugucugcugaauaauaaacuuuuuugaaauaauaaaucugguagaaaaaugagaucuaaaaaaaaaaaaaaaaaaaaaaaaaaaaaaaaaaaaaaaaaaaaaaaaaaaaaaaaaaaaaaaaugcaucccccccccccccccccccccccccccccccaaaggcucuuuucagagccaccagaauu

SEQ ID NO: 1718 - RNA, 2389 nt, Artificial Sequence
  mRNA product Design b-4 comprising derived and/or modified sequence from YFV__NC_002031.1__SSjev(V3)-prMEdelstem_TM-JEV (polyprotein: aa122-681) (opt5)
gggagagucccgcagucggcguccagcggcucugcuuguucgugugugugucguugcaggccuuauucaagcuuaccaugaacgagggcagcaucauguggcuggccucccucgcuguggucauugccugcgcgggggcuguuacgcuggugcggaaaaaccgcuggcuucugcucaaugugaccagcgaggaucuggggaagacauuuuccgucggaaccggcaacugcacaaccaauauucuggaagccaaauacuggugucccgacucuauggaguauaacugcccuaaucucagcccgagagaagaacccgaugacaucgauuguuggugcuacgggguggaaaacguucggguggcuuauggaaagugugacuccgccggccgcucuagacggagccgcagagcgauugaucugccuacacaugagaaucacggccuuaaaacccggcaagagaaguggaugacggggcgcaugggagaaagacagcugcagaagaucgagcggugguucguccgcaaccccuuuuucgcugugaccgcccucacaauugccuaccugguuggcuccaauaugacccagagaguggucaucgcccuucuggugcucgcuguggggccugcuuauagcgcccauugcaucggaauuacagaccgggauuuuaucgaaggcguccacgggggaaccuggguuucugcgacgcuggagcaagacaaaugugugacagugauggcccccgauaagccuucccuggacauuagccucgagaccgucgcuaucgauagaccggccgaagugcgcaaaguuugcuacaacgcugugcugacacaugucaagauuaaugacaaaugucccucuaccggcgaggcccaccuugcggaagagaacgaaggcgacaaugccugcaagcggaccuauuccgauagaggguggggaaacggcugugggcuguucggaaagggcagcaucguggcuugcgccaaauuuacaugcgcuaagucuaugucccucuucgagguugaccagacgaaaauucaguacgugauccgcgcccagcugcacgucggggccaagcaagagaauuggaacaccgauaucaaaacacuuaaguuugacgcucugagcggaucccaggaaguggaguucauuggcuacggcaaagcgacccucgaaugucagguccagacagccguggauuuugggaacucuuauaucgcugagauggaaaccgagagcuggauuguugaccggcaaugggcccaggaucugacgcugccuuggcaguccggaagcggcgggguguggagagagaugcaucaccucgucgaguucgagcccccucaugccgcuacaauccgcgugcuggcccuuggaaaucaagaaggcucucugaagaccgcgcucaccggggcuaugcggguuacaaaggacaccaacgauaauaaccuguacaaacuucacggcggacacguguccugcagagucaagcugagcgcccucacacugaaaggcacgucuuauaagauuuguaccgacaaaauguuuuucgugaagaaucccacagauaccgggcauggaacagugguuaugcaggucaaggugagcaaaggcgccccgugccgcaucccugugaucgucgcugacgaccugaccgccgcuauuaacaaggggauccucgugacgguuaaucccauugccuccaccaacgaugacgaggugcugaucgaagucaauccucccuucggagauucuuacauuaucgugggccggggagacagcagacuuacauaucaguggcacaaagagggcuccagcaucggcagcacccuggggaaggccuucuccacaacgcucaaaggagcucagagacuggccgcgcuuggcgacaccgcuugggauuuugggucuaucggaggcguguucaacagcauugggcgggccguccaccaaguuuuuggaggcgccuuccgcacacuguuuggcgggauguccuggaucacccagggacucaugggcgcucugcuucuguggaugggggugaaugccagagaccggucuauugcucucgccuuccuggcgacaggaggcgugcuggucuuucucgccaccaacgugcaugcuugaggacuaguaauaaggaaacuguaugaaugucugugggcaggaagugaagagauccuucuguaaagguuuuuggaauuaugucugcugaauaauaaacuuuuuugaaauaauaaaucugguagaaaaaugagaucuaaaaaaaaaaaaaaaaaaaaaaaaaaaaaaaaaaaaaaaaaaaaaaaaaaaaaaaaaaaaaaaaugcaucccccccccccccccccccccccccccccccaaaggcucuuuucagagccaccagaauu

SEQ ID NO: 1719 - RNA, 2404 nt, Artificial Sequence
  mRNA product Design b-4 comprising derived and/or modified sequence from YFV__NC_002031.1__X-SS-prME (polyprotein: aa92-778) (opt5)
gggagagucccgcagucggcguccagcggcucugcuuguucgugugugugucguugcaggccuuauucaagcuuaccaugagaggccugagcucccggaagcgcagaucucacgacgugcucaccguccaguuccugauccuugggaugcugcucaugacaggaggcguuacgcuggugcggaaaaaccgcuggcuucugcucaaugugaccagcgaggaucuggggaagacauuuuccgucggaaccggcaacugcacaaccaauauucuggaagccaaauacuggugucccgacucuauggaguauaacugcccuaaucucagcccgagagaagaacccgaugacaucgauuguuggugcuacgggguggaaaacguucggguggcuuauggaaagugugacuccgccggccgcucuagacggagccgcagagcgauugaucugccuacacaugagaaucacggccuuaaaacccggcaagagaaguggaugacggggcgcaugggagaaagacagcugcagaagaucgagcggugguucguccgcaaccccuuuuucgcugugaccgcccucacaauugccuaccugguuggcuccaauaugacccagagaguggucaucgcccuucuggugcucgcuguggggccugcuuauagcgcccauugcaucggaauuacagaccgggauuuuaucgaaggcguccacgggggaaccuggguuucugcgacgcuggagcaagacaaaugugugacagugauggcccccgauaagccuucccuggacauuagccucgagaccgucgcuaucgauagaccggccgaagugcgcaaaguuugcuacaacgcugugcugacacaugucaagauuaaugacaaaugucccucuaccggcgaggcccaccuugcggaagagaacgaaggcgacaaugccugcaagcggaccuauuccgauagaggguggggaaacggcugugggcuguucggaaagggcagcaucguggcuugcgccaaauuuacaugcgcuaagucuaugucccucuucgagguugaccagacgaaaauucaguacgugauccgcgcccagcugcacgucggggccaagcaagagaauuggaacaccgauaucaaaacacuuaaguuugacgcucugagcggaucccaggaaguggaguucauuggcuacggcaaagcgacccucgaaugucagguccagacagccguggauuuugggaacucuuauaucgcugagauggaaaccgagagcuggauuguugaccggcaaugggcccaggaucugacgcugccuuggcaguccggaagcggcgggguguggagagagaugcaucaccucgucgaguucgagcccccucaugccgcuacaauccgcgugcuggcccuuggaaaucaagaaggcucucugaagaccgcgcucaccggggcuaugcggguuacaaaggacaccaacgauaauaaccuguacaaacuucacggcggacacguguccugcagagucaagcugagcgcccucacacugaaaggcacgucuuauaagauuuguaccgacaaaauguuuuucgugaagaaucccacagauaccgggcauggaacagugguuaugcaggucaaggugagcaaaggcgccccgugccgcaucccugugaucgucgcugacgaccugaccgccgcuauuaacaaggggauccucgugacgguuaaucccauugccuccaccaacgaugacgaggugcugaucgaagucaauccucccuucggagauucuuacauuaucgugggccggggagacagcagacuuacauaucaguggcacaaagagggcuccagcaucggaaagcuguuuacccagacaaugaaaggcguugagcgccucgcggugaugggggauaccgccugggacuucucuuccgcuggaggcuuuuucacgagcgucgggaaggggauucauacaguguuuggcucugccuuccaagggcuguuuggcggacugaacuggaucaccaagguuauuaugggcgcugugcuuaucugggucgggauuaauacacggaacaugaccauguccaugagcaugauccucgugggagugauuaugauguuccugucccugggcgucggggccugaggacuaguaauaaggaaacuguaugaaugucugugggcaggaagugaagagauccuucuguaaagguuuuuggaauuaugucugcugaauaauaaacuuuuuugaaauaauaaaucugguagaaaaaugagaucuaaaaaaaaaaaaaaaaaaaaaaaaaaaaaaaaaaaaaaaaaaaaaaaaaaaaaaaaaaaaaaaaugcaucccccccccccccccccccccccccccccccaaaggcucuuuucagagccaccagaauu

SEQ ID NO: 1720 - RNA, 2407 nt, Artificial Sequence
  mRNA product Design b-4 comprising derived and/or modified sequence from YFV__NC_002031.1__SSjev(V3)-prME-XX (polyprotein: aa122-788) (opt5)
gggagagucccgcagucggcguccagcggcucugcuuguucgugugugugucguugcaggccuuauucaagcuuaccaugaacgagggcagcaucauguggcuggccucccucgcuguggucauugccugcgcgggggcuguuacgcuggugcggaaaaaccgcuggcuucugcucaaugugaccagcgaggaucuggggaagacauuuuccgucggaaccggcaacugcacaaccaauauucuggaagccaaauacuggugucccgacucuauggaguauaacugcccuaaucucagcccgagagaagaacccgaugacaucgauuguuggugcuacgggguggaaaacguucggguggcuuauggaaagugugacuccgccggccgcucuagacggagccgcagagcgauugaucugccuacacaugagaaucacggccuuaaaacccggcaagagaaguggaugacggggcgcaugggagaaagacagcugcagaagaucgagcggugguucguccgcaaccccuuuuucgcugugaccgcccucacaauugccuaccugguuggcuccaauaugacccagagaguggucaucgcccuucuggugcucgcuguggggccugcuuauagcgcccauugcaucggaauuacagaccgggauuuuaucgaaggcguccacgggggaaccuggguuucugcgacgcuggagcaagacaaaugugugacagugauggcccccgauaagccuucccuggacauuagccucgagaccgucgcuaucgauagaccggccgaagugcgcaaaguuugcuacaacgcugugcugacacaugucaagauuaaugacaaaugucccucuaccggcgaggcccaccuugcggaagagaacgaaggcgacaaugccugcaagcggaccuauuccgauagaggguggggaaacggcugugggcuguucggaaagggcagcaucguggcuugcgccaaauuuacaugcgcuaagucuaugucccucuucgagguugaccagacgaaaauucaguacgugauccgcgcccagcugcacgucggggccaagcaagagaauuggaacaccgauaucaaaacacuuaaguuugacgcucugagcggaucccaggaaguggaguucauuggcuacggcaaagcgacccucgaaugucagguccagacagccguggauuuugggaacucuuauaucgcugagauggaaaccgagagcuggauuguugaccggcaaugggcccaggaucugacgcugccuuggcaguccggaagcggcgggguguggagagagaugcaucaccucgucgaguucgagcccccucaugccgcuacaauccgcgugcuggcccuuggaaaucaagaaggcucucugaagaccgcgcucaccggggcuaugcggguuacaaaggacaccaacgauaauaaccuguacaaacuucacggcggacacguguccugcagagucaagcugagcgcccucacacugaaaggcacgucuuauaagauuuguaccgacaaaauguuuuucgugaagaaucccacagauaccgggcauggaacagugguuaugcaggucaaggugagcaaaggcgccccgugccgcaucccugugaucgucgcugacgaccugaccgccgcuauuaacaaggggauccucgugacgguuaaucccauugccuccaccaacgaugacgaggugcugaucgaagucaauccucccuucggagauucuuacauuaucgugggccggggagacagcagacuuacauaucaguggcacaaagagggcuccagcaucggaaagcuguuuacccagacaaugaaaggcguugagcgccucgcggugaugggggauaccgccugggacuucucuuccgcuggaggcuuuuucacgagcgucgggaaggggauucauacaguguuuggcucugccuuccaagggcuguuuggcggacugaacuggaucaccaagguuauuaugggcgcugugcuuaucugggucgggauuaauacacggaacaugaccauguccaugagcaugauccucgugggagugauuaugauguuccugucccugggcgucggggccgaucagggaugugcgaucaauuuuggcaaaugaggacuaguaauaaggaaacuguaugaaugucugugggcaggaagugaagagauccuucuguaaagguuuuuggaauuaugucugcugaauaauaaacuuuuuugaaauaauaaaucugguagaaaaaugagaucuaaaaaaaaaaaaaaaaaaaaaaaaaaaaaaaaaaaaaaaaaaaaaaaaaaaaaaaaaaaaaaaaugcaucccccccccccccccccccccccccccccccaaaggcucuuuucagagccaccagaauu

SEQ ID NO: 1721 - RNA, 2416 nt, Artificial Sequence
  mRNA product Design b-4 comprising derived and/or modified sequence from YFV__NC_002031.1__X-SS-prMEdelstem_TM-JEV (polyprotein: aa92-681) (opt6)
gggagagucccgcagucggcguccagcggcucugcuuguucgugugugugucguugcaggccuuauucaagcuuaccaugagaggauuaucaaguagaaaaagaagaucacaugauguacuaaccgugcaauuuuugaucuuagggaugcucuuaaugacaggagguguuacauuaguaagaaagaaucgauggcugcuuuuaaaugugacaucagaggauuuagggaaaacauuuucgguaggaacaggaaauuguacuacaaauauacuugaagcaaaauauuggugcccagacucuauggaauauaauuguccaaauuuaaguccuagagaagaaccugacgauauagauuguugguguuaugguguagaaaauguaagaguagcauacggcaaaugcgauagugcaggacguucuagacguucaaggagagccauagaucugcccacucacgaaaaucacggauugaaaacacgacaagaaaaauggaugacugggcgaaugggagaaagacaacuacagaaaauugaaagaugguucguuagaaauccauucuuugccguaacagcuuuaacaauagccuauuuaguagguaguaauaugacacaaagaguaguaauagcauugcuaguguuagcaguuggaccagcuuauagugcacauugcauaggaauaacagauagagacuuuauagaaggaguacacgggggaacuuggguaagugccacuuuagaacaagauaaauguguuacagugauggcgccagauaaaccaagucuggacauaaguuuggaaacaguagcgauugauagacccgcagaaguaagaaaaguuuguuauaaugcuguucuaacccauguuaaaauaaaugauaaaugcccuagcaccggagaagcccaucuagcagaagaaaaugaaggagauaacgcauguaaacgaacauacucagauagaggauggggcaacggauguggcuuguuuggaaaagguagcauaguagcaugcgcuaaauuuacaugcgcaaagucaaugucauuauuugaaguagaucaaacaaaaauacaauauguaauaagagcucaauuacacgugggugcaaaacaagaaaauuggaauacagacauaaagacacuaaaguucgacgcauuaaguggaucacaagagguagaauuuauaggguacggaaaagcgacuuuagagugucaaguccaaacagcaguagauuucgguaacucauacauagcagaaauggaaacugaaaguuggauaguagauagacaaugggcacaagacuugacacuaccuuggcaaucaggaagcggaggaguauggagagaaaugcaucauuuaguagaauuugaaccaccucaugcagcaacaauaagaguauuagcccuaggaaaccaagaaggaaguuuaaaaacagcacuaacaggagcuaugagaguaacaaaagauacaaaugacaacaaucuauacaaauuacacggaggacauguaagcugccggguaaaguugagcgcacuaacauuaaaaggaacgaguuauaaaauaugcacagauaaaauguucuuuguuaaaaauccuacagauaccggucauggaacaguaguaaugcaaguaaaaguaaguaaaggcgcucccuguagaauaccuguaauagucgcagacgauuuaaccgcagcaauaaauaaaggaauauuagucacgguaaacccaauagcgucaacaaaugaugaugaaguauuaauagaaguuaacccaccuuuuggagacaguuauauaauagucggaaggggugauaguagacuaacauaccaauggcauaaagaaggaagcucaauaggaaguacacuaggaaaagcauuuaguacaacauuaaaaggagcacaaagauuagcagcauuaggagauacagcaugggauuuuggaagcauaggaggaguauuuaauaguauagguagagcaguacaucaaguauuuggaggagcauuuagaacauuauuuggaggaaugaguuggauaacacaaggauuaaugggagcauuauuauuauggaugggaguaaaugcaagagauagaaguauagcauuagcauuuuuagcaacaggaggaguauuaguauuuuuagcaacaaauguacaugcaugaggacuaguaauaaggaaacuguaugaaugucugugggcaggaagugaagagauccuucuguaaagguuuuuggaauuaugucugcugaauaauaaacuuuuuugaaauaauaaaucugguagaaaaaugagaucuaaaaaaaaaaaaaaaaaaaaaaaaaaaaaaaaaaaaaaaaaaaaaaaaaaaaaaaaaaaaaaaaugcaucccccccccccccccccccccccccccccccaaaggcucuuuucagagccaccagaauu

SEQ ID NO: 1722 - RNA, 2389 nt, Artificial Sequence
  mRNA product Design b-4 comprising derived and/or modified sequence from YFV__NC_002031.1__SSjev(V3)-prMEdelstem_TM-JEV (polyprotein: aa122-681) (opt6)
gggagagucccgcagucggcguccagcggcucugcuuguucgugugugugucguugcaggccuuauucaagcuuaccaugaaugaagguucaauuaugugguuggcaucauuagcaguuguaauugcaugugcuggugcaguuacauuaguaagaaagaaucgauggcugcuuuuaaaugugacaucagaggauuuagggaaaacauuuucgguaggaacaggaaauuguacuacaaauauacuugaagcaaaauauuggugcccagacucuauggaauauaauuguccaaauuuaaguccuagagaagaaccugacgauauagauuguugguguuaugguguagaaaauguaagaguagcauacggcaaaugcgauagugcaggacguucuagacguucaaggagagccauagaucugcccacucacgaaaaucacggauugaaaacacgacaagaaaaauggaugacugggcgaaugggagaaagacaacuacagaaaauugaaagaugguucguuagaaauccauucuuugccguaacagcuuuaacaauagccuauuuaguagguaguaauaugacacaaagaguaguaauagcauugcuaguguuagcaguuggaccagcuuauagugcacauugcauaggaauaacagauagagacuuuauagaaggaguacacgggggaacuuggguaagugccacuuuagaacaagauaaauguguuacagugauggcgccagauaaaccaagucuggacauaaguuuggaaacaguagcgauugauagacccgcagaaguaagaaaaguuuguuauaaugcuguucuaacccauguuaaaauaaaugauaaaugcccuagcaccggagaagcccaucuagcagaagaaaaugaaggagauaacgcauguaaacgaacauacucagauagaggauggggcaacggauguggcuuguuuggaaaagguagcauaguagcaugcgcuaaauuuacaugcgcaaagucaaugucauuauuugaaguagaucaaacaaaaauacaauauguaauaagagcucaauuacacgugggugcaaaacaagaaaauuggaauacagacauaaagacacuaaaguucgacgcauuaaguggaucacaagagguagaauuuauaggguacggaaaagcgacuuuagagugucaaguccaaacagcaguagauuucgguaacucauacauagcagaaauggaaacugaaaguuggauaguagauagacaaugggcacaagacuugacacuaccuuggcaaucaggaagcggaggaguauggagagaaaugcaucauuuaguagaauuugaaccaccucaugcagcaacaauaagaguauuagcccuaggaaaccaagaaggaaguuuaaaaacagcacuaacaggagcuaugagaguaacaaaagauacaaaugacaacaaucuauacaaauuacacggaggacauguaagcugccggguaaaguugagcgcacuaacauuaaaaggaacgaguuauaaaauaugcacagauaaaauguucuuuguuaaaaauccuacagauaccggucauggaacaguaguaaugcaaguaaaaguaaguaaaggcgcucccuguagaauaccuguaauagucgcagacgauuuaaccgcagcaauaaauaaaggaauauuagucacgguaaacccaauagcgucaacaaaugaugaugaaguauuaauagaaguuaacccaccuuuuggagacaguuauauaauagucggaaggggugauaguagacuaacauaccaauggcauaaagaaggaagcucaauaggaaguacacuaggaaaagcauuuaguacaacauuaaaaggagcacaaagauuagcagcauuaggagauacagcaugggauuuuggaagcauaggaggaguauuuaauaguauagguagagcaguacaucaaguauuuggaggagcauuuagaacauuauuuggaggaaugaguuggauaacacaaggauuaaugggagcauuauuauuauggaugggaguaaaugcaagagauagaaguauagcauuagcauuuuuagcaacaggaggaguauuaguauuuuuagcaacaaauguacaugcaugaggacuaguaauaaggaaacuguaugaaugucugugggcaggaagugaagagauccuucuguaaagguuuuuggaauuaugucugcugaauaauaaacuuuuuugaaauaauaaaucugguagaaaaaugagaucuaaaaaaaaaaaaaaaaaaaaaaaaaaaaaaaaaaaaaaaaaaaaaaaaaaaaaaaaaaaaaaaaugcaucccccccccccccccccccccccccccccccaaaggcucuuuucagagccaccagaauu

SEQ ID NO: 1723 - RNA, 2404 nt, Artificial Sequence
  mRNA product Design b-4 comprising derived and/or modified sequence from YFV__NC_002031.1__X-SS-prME (polyprotein: aa92-778) (opt6)
gggagagucccgcagucggcguccagcggcucugcuuguucgugugugugucguugcaggccuuauucaagcuuaccaugagaggauuaucaaguagaaaaagaagaucacaugauguacuaaccgugcaauuuuugaucuuagggaugcucuuaaugacaggagguguuacauuaguaagaaagaaucgauggcugcuuuuaaaugugacaucagaggauuuagggaaaacauuuucgguaggaacaggaaauuguacuacaaauauacuugaagcaaaauauuggugcccagacucuauggaauauaauuguccaaauuuaaguccuagagaagaaccugacgauauagauuguugguguuaugguguagaaaauguaagaguagcauacggcaaaugcgauagugcaggacguucuagacguucaaggagagccauagaucugcccacucacgaaaaucacggauugaaaacacgacaagaaaaauggaugacugggcgaaugggagaaagacaacuacagaaaauugaaagaugguucguuagaaauccauucuuugccguaacagcuuuaacaauagccuauuuaguagguaguaauaugacacaaagaguaguaauagcauugcuaguguuagcaguuggaccagcuuauagugcacauugcauaggaauaacagauagagacuuuauagaaggaguacacgggggaacuuggguaagugccacuuuagaacaagauaaauguguuacagugauggcgccagauaaaccaagucuggacauaaguuuggaaacaguagcgauugauagacccgcagaaguaagaaaaguuuguuauaaugcuguucuaacccauguuaaaauaaaugauaaaugcccuagcaccggagaagcccaucuagcagaagaaaaugaaggagauaacgcauguaaacgaacauacucagauagaggauggggcaacggauguggcuuguuuggaaaagguagcauaguagcaugcgcuaaauuuacaugcgcaaagucaaugucauuauuugaaguagaucaaacaaaaauacaauauguaauaagagcucaauuacacgugggugcaaaacaagaaaauuggaauacagacauaaagacacuaaaguucgacgcauuaaguggaucacaagagguagaauuuauaggguacggaaaagcgacuuuagagugucaaguccaaacagcaguagauuucgguaacucauacauagcagaaauggaaacugaaaguuggauaguagauagacaaugggcacaagacuugacacuaccuuggcaaucaggaagcggaggaguauggagagaaaugcaucauuuaguagaauuugaaccaccucaugcagcaacaauaagaguauuagcccuaggaaaccaagaaggaaguuuaaaaacagcacuaacaggagcuaugagaguaacaaaagauacaaaugacaacaaucuauacaaauuacacggaggacauguaagcugccggguaaaguugagcgcacuaacauuaaaaggaacgaguuauaaaauaugcacagauaaaauguucuuuguuaaaaauccuacagauaccggucauggaacaguaguaaugcaaguaaaaguaaguaaaggcgcucccuguagaauaccuguaauagucgcagacgauuuaaccgcagcaauaaauaaaggaauauuagucacgguaaacccaauagcgucaacaaaugaugaugaaguauuaauagaaguuaacccaccuuuuggagacaguuauauaauagucggaaggggugauaguagacuaacauaccaauggcauaaagaaggaagcucaauaggaaaauuauuuacucaaaccaugaaagguguagaaaggcuagcuguuaugggugacacagcaugggauuuuucaagcgcaggaggguucuuuacaucaguagguaaaggaauacauacaguauuuggaagugcauuucaaggauuauuuggugguuuaaauuggauaacaaaaguaauaaugggcgcaguuuuaauauggguagguauaaacacaagaaauaugacaaugucuaugaguaugauauuggucggaguaauaaugauguuuuuaucacuaggagugggugcaugaggacuaguaauaaggaaacuguaugaaugucugugggcaggaagugaagagauccuucuguaaagguuuuuggaauuaugucugcugaauaauaaacuuuuuugaaauaauaaaucugguagaaaaaugagaucuaaaaaaaaaaaaaaaaaaaaaaaaaaaaaaaaaaaaaaaaaaaaaaaaaaaaaaaaaaaaaaaaugcaucccccccccccccccccccccccccccccccaaaggcucuuuucagagccaccagaauu

SEQ ID NO: 1724 - RNA, 2407 nt, Artificial Sequence
  mRNA product Design b-4 comprising derived and/or modified sequence from YFV__NC_002031.1__SSjev(V3)-prME-XX (polyprotein: aa122-788) (opt6)
gggagagucccgcagucggcguccagcggcucugcuuguucgugugugugucguugcaggccuuauucaagcuuaccaugaaugaagguucaauuaugugguuggcaucauuagcaguuguaauugcaugugcuggugcaguuacauuaguaagaaagaaucgauggcugcuuuuaaaugugacaucagaggauuuagggaaaacauuuucgguaggaacaggaaauuguacuacaaauauacuugaagcaaaauauuggugcccagacucuauggaauauaauuguccaaauuuaaguccuagagaagaaccugacgauauagauuguugguguuaugguguagaaaauguaagaguagcauacggcaaaugcgauagugcaggacguucuagacguucaaggagagccauagaucugcccacucacgaaaaucacggauugaaaacacgacaagaaaaauggaugacugggcgaaugggagaaagacaacuacagaaaauugaaagaugguucguuagaaauccauucuuugccguaacagcuuuaacaauagccuauuuaguagguaguaauaugacacaaagaguaguaauagcauugcuaguguuagcaguuggaccagcuuauagugcacauugcauaggaauaacagauagagacuuuauagaaggaguacacgggggaacuuggguaagugccacuuuagaacaagauaaauguguuacagugauggcgccagauaaaccaagucuggacauaaguuuggaaacaguagcgauugauagacccgcagaaguaagaaaaguuuguuauaaugcuguucuaacccauguuaaaauaaaugauaaaugcccuagcaccggagaagcccaucuagcagaagaaaaugaaggagauaacgcauguaaacgaacauacucagauagaggauggggcaacggauguggcuuguuuggaaaagguagcauaguagcaugcgcuaaauuuacaugcgcaaagucaaugucauuauuugaaguagaucaaacaaaaauacaauauguaauaagagcucaauuacacgugggugcaaaacaagaaaauuggaauacagacauaaagacacuaaaguucgacgcauuaaguggaucacaagagguagaauuuauaggguacggaaaagcgacuuuagagugucaaguccaaacagcaguagauuucgguaacucauacauagcagaaauggaaacugaaaguuggauaguagauagacaaugggcacaagacuugacacuaccuuggcaaucaggaagcggaggaguauggagagaaaugcaucauuuaguagaauuugaaccaccucaugcagcaacaauaagaguauuagcccuaggaaaccaagaaggaaguuuaaaaacagcacuaacaggagcuaugagaguaacaaaagauacaaaugacaacaaucuauacaaauuacacggaggacauguaagcugccggguaaaguugagcgcacuaacauuaaaaggaacgaguuauaaaauaugcacagauaaaauguucuuuguuaaaaauccuacagauaccggucauggaacaguaguaaugcaaguaaaaguaaguaaaggcgcucccuguagaauaccuguaauagucgcagacgauuuaaccgcagcaauaaauaaaggaauauuagucacgguaaacccaauagcgucaacaaaugaugaugaaguauuaauagaaguuaacccaccuuuuggagacaguuauauaauagucggaaggggugauaguagacuaacauaccaauggcauaaagaaggaagcucaauaggaaaauuauuuacucaaaccaugaaagguguagaaaggcuagcuguuaugggugacacagcaugggauuuuucaagcgcaggaggguucuuuacaucaguagguaaaggaauacauacaguauuuggaagugcauuucaaggauuauuuggugguuuaaauuggauaacaaaaguaauaaugggcgcaguuuuaauauggguagguauaaacacaagaaauaugacaaugucuaugaguaugauauuggucggaguaauaaugauguuuuuaucacuaggagugggugcagaucaagguugcgcuauuaauuuuggaaaaugaggacuaguaauaaggaaacuguaugaaugucugugggcaggaagugaagagauccuucuguaaagguuuuuggaauuaugucugcugaauaauaaacuuuuuugaaauaauaaaucugguagaaaaaugagaucuaaaaaaaaaaaaaaaaaaaaaaaaaaaaaaaaaaaaaaaaaaaaaaaaaaaaaaaaaaaaaaaaugcaucccccccccccccccccccccccccccccccaaaggcucuuuucagagccaccagaauu

SEQ ID NO: 1725 - RNA, 2416 nt, Artificial Sequence
  mRNA product Design b-4 comprising derived and/or modified sequence from YFV__NC_002031.1__X-SS-prMEdelstem_TM-JEV (polyprotein: aa92-681) (opt11)
gggagagucccgcagucggcguccagcggcucugcuuguucgugugugugucguugcaggccuuauucaagcuuaccaugcggggacuaagcagcagaaaaagacgcagccacgaugugcucaccgugcaauuccucauacuggggaugcuccuaaugaccggaggcgugacccuaguaaggaaaaacagauggcuacuacuaaacguaaccucagaagaucuaggaaagacauuuucagucggcacaggcaacugcacaaccaacauacuagaagcaaaauauuggugcccagacagcauggaauacaacugucccaaccucagcccaagagaggaaccagacgacauagacugcugguguuacggaguagaaaacguaagaguggcauacggcaaaugcgacagcgcaggcaggagccgaagaucccgcagagccaucgacuugcccacgcacgaaaaccacggccucaaaacacgacaagaaaaauggaugacagggcgaaugggagaacgacagcuccagaaaauagaacgaugguucguccggaacccguucuucgcaguaacggcacuaacaaucgcauaccucguaggcagcaacaugacacaaagaguggucaucgcgcuacucguacuagcaguggggcccgcauacagugcacacugcauaggaaucacagaccgugacuucaucgaaggcguacacggaggaacguggguaagcgcgacacuggaacaagacaaaugcgugacaguaauggcaccagacaaaccaagccuagacauaucccuagaaacggucgccaucgaccgucccgcagaaguacgaaagguaugcuauaaugcaguccucacacacgucaaaauaaacgacaaaugccccagcacgggcgaagcacaccucgccgaagaaaacgaaggggauaacgcgugcaaacgcaccuacuccgacaggggauggggcaacggaugcggacuguucggaaaaggauccauagucgcaugcgcaaaauuuaccugcgcaaaaagcaugagcuuguucgagguagaccaaacgaagauccaauacguaauccgagcucaacuacacguuggggccaagcaagagaacuggaauacggacaucaaaacacuaaaauucgacgcacucuccggcucacaagaagucgaguucaucggcuacggcaaagcaacacuagaaugccaaguacaaacagcgguggacuucggcaacagcuacauagcagaaauggaaacagaaagcuggauaguagaccgacaaugggcacaagaccuaacucugccauggcaaagcggcucaggaggaguguggagagagaugcaccaccugguagaguucgaacccccacacgcagcaacaauaaggguacuggcacuaggcaaccaagaaggcagccuaaaaaccgcacucacaggagccaugcgcgugacgaaggacaccaacgacaacaaccucuacaaacuccacggagggcacguauccugccgcguaaaacuaucagcacuaacgcuaaaaggaacaagcuacaaaauaugcacagacaaaauguucuucgucaaaaaccccacagacacaggccacggcacagucguaaugcaagugaaggucagcaagggggcccccugccgaaucccagucauaguggcagacgaccucacggccgccaucaacaaagggauccugguaacagugaacccaauagcaucgaccaacgacgacgaaguccucauagaagugaaucccccguucggcgacagcuacaucaucguaggacgcggcgacucccgacugacguaccaauggcauaaagaaggcagcagcauugggagcacgcucgggaaagcguucucgaccacgcucaagggcgcgcaaaggcucgcggccuugggcgauaccgcgugggauuucgggagcauaggcggggucuuuaacucgaucgggcgcgcgguccaucaaguguucgggggcgcguucaggaccuuguucgggggcaugagcuggaucacgcaagggcucaugggcgcgcucuugcucuggaugggggucaaugccagggacaggagcauagccuuggccuuucucgcgaccgggggcgugcucguguucuuggccacgaacgugcacgcgugaggacuaguaauaaggaaacuguaugaaugucugugggcaggaagugaagagauccuucuguaaagguuuuuggaauuaugucugcugaauaauaaacuuuuuugaaauaauaaaucugguagaaaaaugagaucuaaaaaaaaaaaaaaaaaaaaaaaaaaaaaaaaaaaaaaaaaaaaaaaaaaaaaaaaaaaaaaaaugcaucccccccccccccccccccccccccccccccaaaggcucuuuucagagccaccagaauu

SEQ ID NO: 1726 - RNA, 2389 nt, Artificial Sequence
  mRNA product Design b-4 comprising derived and/or modified sequence from YFV__NC_002031.1__SSjev(V3)-prMEdelstem_TM-JEV (polyprotein: aa122-681) (opt11)
gggagagucccgcagucggcguccagcggcucugcuuguucgugugugugucguugcaggccuuauucaagcuuaccaugaacgagggcucgaucaugugguuggccucgcucgcggucgugaucgcgugcgcgggcgcggugacccuaguaaggaaaaacagauggcuacuacuaaacguaaccucagaagaucuaggaaagacauuuucagucggcacaggcaacugcacaaccaacauacuagaagcaaaauauuggugcccagacagcauggaauacaacugucccaaccucagcccaagagaggaaccagacgacauagacugcugguguuacggaguagaaaacguaagaguggcauacggcaaaugcgacagcgcaggcaggagccgaagaucccgcagagccaucgacuugcccacgcacgaaaaccacggccucaaaacacgacaagaaaaauggaugacagggcgaaugggagaacgacagcuccagaaaauagaacgaugguucguccggaacccguucuucgcaguaacggcacuaacaaucgcauaccucguaggcagcaacaugacacaaagaguggucaucgcgcuacucguacuagcaguggggcccgcauacagugcacacugcauaggaaucacagaccgugacuucaucgaaggcguacacggaggaacguggguaagcgcgacacuggaacaagacaaaugcgugacaguaauggcaccagacaaaccaagccuagacauaucccuagaaacggucgccaucgaccgucccgcagaaguacgaaagguaugcuauaaugcaguccucacacacgucaaaauaaacgacaaaugccccagcacgggcgaagcacaccucgccgaagaaaacgaaggggauaacgcgugcaaacgcaccuacuccgacaggggauggggcaacggaugcggacuguucggaaaaggauccauagucgcaugcgcaaaauuuaccugcgcaaaaagcaugagcuuguucgagguagaccaaacgaagauccaauacguaauccgagcucaacuacacguuggggccaagcaagagaacuggaauacggacaucaaaacacuaaaauucgacgcacucuccggcucacaagaagucgaguucaucggcuacggcaaagcaacacuagaaugccaaguacaaacagcgguggacuucggcaacagcuacauagcagaaauggaaacagaaagcuggauaguagaccgacaaugggcacaagaccuaacucugccauggcaaagcggcucaggaggaguguggagagagaugcaccaccugguagaguucgaacccccacacgcagcaacaauaaggguacuggcacuaggcaaccaagaaggcagccuaaaaaccgcacucacaggagccaugcgcgugacgaaggacaccaacgacaacaaccucuacaaacuccacggagggcacguauccugccgcguaaaacuaucagcacuaacgcuaaaaggaacaagcuacaaaauaugcacagacaaaauguucuucgucaaaaaccccacagacacaggccacggcacagucguaaugcaagugaaggucagcaagggggcccccugccgaaucccagucauaguggcagacgaccucacggccgccaucaacaaagggauccugguaacagugaacccaauagcaucgaccaacgacgacgaaguccucauagaagugaaucccccguucggcgacagcuacaucaucguaggacgcggcgacucccgacugacguaccaauggcauaaagaaggcagcagcauugggagcacgcucgggaaagcguucucgaccacgcucaagggcgcgcaaaggcucgcggccuugggcgauaccgcgugggauuucgggagcauaggcggggucuuuaacucgaucgggcgcgcgguccaucaaguguucgggggcgcguucaggaccuuguucgggggcaugagcuggaucacgcaagggcucaugggcgcgcucuugcucuggaugggggucaaugccagggacaggagcauagccuuggccuuucucgcgaccgggggcgugcucguguucuuggccacgaacgugcacgcgugaggacuaguaauaaggaaacuguaugaaugucugugggcaggaagugaagagauccuucuguaaagguuuuuggaauuaugucugcugaauaauaaacuuuuuugaaauaauaaaucugguagaaaaaugagaucuaaaaaaaaaaaaaaaaaaaaaaaaaaaaaaaaaaaaaaaaaaaaaaaaaaaaaaaaaaaaaaaaugcaucccccccccccccccccccccccccccccccaaaggcucuuuucagagccaccagaauu

SEQ ID NO: 1727 - RNA, 2404 nt, Artificial Sequence
  mRNA product Design b-4 comprising derived and/or modified sequence from YFV__NC_002031.1__X-SS-prME (polyprotein: aa92-778) (opt11)
gggagagucccgcagucggcguccagcggcucugcuuguucgugugugugucguugcaggccuuauucaagcuuaccaugcggggacuaagcagcagaaaaagacgcagccacgaugugcucaccgugcaauuccucauacuggggaugcuccuaaugaccggaggcgugacccuaguaaggaaaaacagauggcuacuacuaaacguaaccucagaagaucuaggaaagacauuuucagucggcacaggcaacugcacaaccaacauacuagaagcaaaauauuggugcccagacagcauggaauacaacugucccaaccucagcccaagagaggaaccagacgacauagacugcugguguuacggaguagaaaacguaagaguggcauacggcaaaugcgacagcgcaggcaggagccgaagaucccgcagagccaucgacuugcccacgcacgaaaaccacggccucaaaacacgacaagaaaaauggaugacagggcgaaugggagaacgacagcuccagaaaauagaacgaugguucguccggaacccguucuucgcaguaacggcacuaacaaucgcauaccucguaggcagcaacaugacacaaagaguggucaucgcgcuacucguacuagcaguggggcccgcauacagugcacacugcauaggaaucacagaccgugacuucaucgaaggcguacacggaggaacguggguaagcgcgacacuggaacaagacaaaugcgugacaguaauggcaccagacaaaccaagccuagacauaucccuagaaacggucgccaucgaccgucccgcagaaguacgaaagguaugcuauaaugcaguccucacacacgucaaaauaaacgacaaaugccccagcacgggcgaagcacaccucgccgaagaaaacgaaggggauaacgcgugcaaacgcaccuacuccgacaggggauggggcaacggaugcggacuguucggaaaaggauccauagucgcaugcgcaaaauuuaccugcgcaaaaagcaugagcuuguucgagguagaccaaacgaagauccaauacguaauccgagcucaacuacacguuggggccaagcaagagaacuggaauacggacaucaaaacacuaaaauucgacgcacucuccggcucacaagaagucgaguucaucggcuacggcaaagcaacacuagaaugccaaguacaaacagcgguggacuucggcaacagcuacauagcagaaauggaaacagaaagcuggauaguagaccgacaaugggcacaagaccuaacucugccauggcaaagcggcucaggaggaguguggagagagaugcaccaccugguagaguucgaacccccacacgcagcaacaauaaggguacuggcacuaggcaaccaagaaggcagccuaaaaaccgcacucacaggagccaugcgcgugacgaaggacaccaacgacaacaaccucuacaaacuccacggagggcacguauccugccgcguaaaacuaucagcacuaacgcuaaaaggaacaagcuacaaaauaugcacagacaaaauguucuucgucaaaaaccccacagacacaggccacggcacagucguaaugcaagugaaggucagcaagggggcccccugccgaaucccagucauaguggcagacgaccucacggccgccaucaacaaagggauccugguaacagugaacccaauagcaucgaccaacgacgacgaaguccucauagaagugaaucccccguucggcgacagcuacaucaucguaggacgcggcgacucccgacugacguaccaauggcauaaagaaggcagcagcauuggaaaacuauucacccaaaccaugaagggcgucgaaagacucgcggugaugggagacaccgcaugggacuucucgagcgcaggcggcuucuucacaagcguaggaaaagggauucacacaguauucggauccgcauuccaaggccucuucgggggacuaaacuggauaacgaaaguaauaaugggagcaguucucauauggguaggaaucaacacacgaaacaugacaauguccaugucaaugauacucguaggcguaaucaugauguuucugucacucggagugggagcaugaggacuaguaauaaggaaacuguaugaaugucugugggcaggaagugaagagauccuucuguaaagguuuuuggaauuaugucugcugaauaauaaacuuuuuugaaauaauaaaucugguagaaaaaugagaucuaaaaaaaaaaaaaaaaaaaaaaaaaaaaaaaaaaaaaaaaaaaaaaaaaaaaaaaaaaaaaaaaugcaucccccccccccccccccccccccccccccccaaaggcucuuuucagagccaccagaauu

SEQ ID NO: 1728 - RNA, 2407 nt, Artificial Sequence
  mRNA product Design b-4 comprising derived and/or modified sequence from YFV__NC_002031.1__SSjev(V3)-prME-XX (polyprotein: aa122-788) (opt11)
gggagagucccgcagucggcguccagcggcucugcuuguucgugugugugucguugcaggccuuauucaagcuuaccaugaacgagggcucgaucaugugguuggccucgcucgcggucgugaucgcgugcgcgggcgcggugacccuaguaaggaaaaacagauggcuacuacuaaacguaaccucagaagaucuaggaaagacauuuucagucggcacaggcaacugcacaaccaacauacuagaagcaaaauauuggugcccagacagcauggaauacaacugucccaaccucagcccaagagaggaaccagacgacauagacugcugguguuacggaguagaaaacguaagaguggcauacggcaaaugcgacagcgcaggcaggagccgaagaucccgcagagccaucgacuugcccacgcacgaaaaccacggccucaaaacacgacaagaaaaauggaugacagggcgaaugggagaacgacagcuccagaaaauagaacgaugguucguccggaacccguucuucgcaguaacggcacuaacaaucgcauaccucguaggcagcaacaugacacaaagaguggucaucgcgcuacucguacuagcaguggggcccgcauacagugcacacugcauaggaaucacagaccgugacuucaucgaaggcguacacggaggaacguggguaagcgcgacacuggaacaagacaaaugcgugacaguaauggcaccagacaaaccaagccuagacauaucccuagaaacggucgccaucgaccgucccgcagaaguacgaaagguaugcuauaaugcaguccucacacacgucaaaauaaacgacaaaugccccagcacgggcgaagcacaccucgccgaagaaaacgaaggggauaacgcgugcaaacgcaccuacuccgacaggggauggggcaacggaugcggacuguucggaaaaggauccauagucgcaugcgcaaaauuuaccugcgcaaaaagcaugagcuuguucgagguagaccaaacgaagauccaauacguaauccgagcucaacuacacguuggggccaagcaagagaacuggaauacggacaucaaaacacuaaaauucgacgcacucuccggcucacaagaagucgaguucaucggcuacggcaaagcaacacuagaaugccaaguacaaacagcgguggacuucggcaacagcuacauagcagaaauggaaacagaaagcuggauaguagaccgacaaugggcacaagaccuaacucugccauggcaaagcggcucaggaggaguguggagagagaugcaccaccugguagaguucgaacccccacacgcagcaacaauaaggguacuggcacuaggcaaccaagaaggcagccuaaaaaccgcacucacaggagccaugcgcgugacgaaggacaccaacgacaacaaccucuacaaacuccacggagggcacguauccugccgcguaaaacuaucagcacuaacgcuaaaaggaacaagcuacaaaauaugcacagacaaaauguucuucgucaaaaaccccacagacacaggccacggcacagucguaaugcaagugaaggucagcaagggggcccccugccgaaucccagucauaguggcagacgaccucacggccgccaucaacaaagggauccugguaacagugaacccaauagcaucgaccaacgacgacgaaguccucauagaagugaaucccccguucggcgacagcuacaucaucguaggacgcggcgacucccgacugacguaccaauggcauaaagaaggcagcagcauuggaaaacuauucacccaaaccaugaagggcgucgaaagacucgcggugaugggagacaccgcaugggacuucucgagcgcaggcggcuucuucacaagcguaggaaaagggauucacacaguauucggauccgcauuccaaggccucuucgggggacuaaacuggauaacgaaaguaauaaugggagcaguucucauauggguaggaaucaacacacgaaacaugacaauguccaugucaaugauacucguaggcguaaucaugauguuucugucacucggagugggagcagaccaagguugcgccauaaacuucggcaagugaggacuaguaauaaggaaacuguaugaaugucugugggcaggaagugaagagauccuucuguaaagguuuuuggaauuaugucugcugaauaauaaacuuuuuugaaauaauaaaucugguagaaaaaugagaucuaaaaaaaaaaaaaaaaaaaaaaaaaaaaaaaaaaaaaaaaaaaaaaaaaaaaaaaaaaaaaaaaugcaucccccccccccccccccccccccccccccccaaaggcucuuuucagagccaccagaauu

SEQ ID NO: 1729 - RNA, 2365 nt, Artificial Sequence
  mRNA product Design c-5 comprising derived and/or modified sequence from YFV__NC_002031.1__X-SS-prMEdelstem_TM-JEV (polyprotein: aa92-681) (wt)
gggagagcggcucggccauuuugucccagucaguccggaggcugcggcugcagaaguaccgccugcggaguaacugcaaagaagcuuaccaugagaggauuguccucaaggaaacgccguucccaugauguucugacugugcaauuccuaauuuugggaaugcuguugaugacggguggagugaccuuggugcggaaaaacagaugguugcuccuaaaugugacaucugaggaccucgggaaaacauucucugugggcacaggcaacugcacaacaaacauuuuggaagccaaguacuggugcccagacucaauggaauacaacugucccaaucucaguccaagagaggagccagaugacauugauugcuggugcuaugggguggaaaacguuagagucgcauaugguaagugugacucagcaggcaggucuaggaggucaagaagggccauugacuugccuacgcaugaaaaccaugguuugaagacccggcaagaaaaauggaugacuggaagaaugggugaaaggcaacuccaaaagauugagagaugguucgugaggaaccccuuuuuugcagugacggcucugaccauugccuaccuugugggaagcaacaugacgcaacgagucgugauugcccuacuggucuuggcuguugguccggccuacucagcucacugcauuggaauuacugacagggauuucauugagggggugcauggaggaacuuggguuucagcuacccuggagcaagacaagugugucacuguuauggccccugacaagccuucauuggacaucucacuagagacaguagccauugauagaccugcugaggugaggaaaguguguuacaaugcaguucucacucaugugaagauuaaugacaagugccccagcacuggagaggcccaccuagcugaagagaacgaaggggacaaugcgugcaagcgcacuuauucugauagaggcuggggcaauggcuguggccuauuugggaaagggagcauuguggcaugcgccaaauucacuugugccaaauccaugaguuuguuugagguugaucagaccaaaauucaguaugucaucagagcacaauugcauguaggggccaagcaggaaaauuggaauaccgacauuaagacucucaaguuugaugcccugucaggcucccaggaagucgaguucauuggguauggaaaagcuacacuggaaugccaggugcaaacugcgguggacuuugguaacaguuacaucgcugagauggaaacagagagcuggauaguggacagacagugggcccaggacuugacccugccauggcagaguggaaguggcgggguguggagagagaugcaucaucuugucgaauuugaaccuccgcaugccgccacuaucagaguacuggcccugggaaaccaggaaggcuccuugaaaacagcucuuacuggcgcaaugaggguuacaaaggacacaaaugacaacaaccuuuacaaacuacaugguggacauguuucuugcagagugaaauugucagcuuugacacucaaggggacauccuacaaaauaugcacugacaaaauguuuuuugucaagaacccaacugacacuggccauggcacuguugugaugcaggugaaagugucaaaaggagcccccugcaggauuccagugauaguagcugaugaucuuacagcggcaaucaauaaaggcauuuugguuacaguuaaccccaucgccucaaccaaugaugaugaagugcugauugaggugaacccaccuuuuggagacagcuacauuaucguugggagaggagauucacgucucacuuaccaguggcacaaagagggaagcucaauaggcagcacgcugggcaaggccuuuucaacaacuuugaagggagcucaaagacuggcagcguugggcgacacagccugggacuuuggcucuauuggaggggucuucaacuccauaggaagagccguucaccaaguguuugguggugccuucagaacacucuuugggggaaugucuuggaucacacaagggcuaaugggugcccuacugcucuggaugggcgucaacgcacgagaccgaucaauugcuuuggccuucuuagccacaggaggugugcucguguucuuagcgaccaaugugcacgccuaaggacuagucccuguucccagagcccacuuuuuuuucuuuuuuugaaauaaaauagccugucuuucagaucuaaaaaaaaaaaaaaaaaaaaaaaaaaaaaaaaaaaaaaaaaaaaaaaaaaaaaaaaaaaaaaaaugcaucccccccccccccccccccccccccccccccaaaggcucuuuucagagccaccagaauu

SEQ ID NO: 1730 - RNA, 2338 nt, Artificial Sequence
  mRNA product Design c-5 comprising derived and/or modified sequence from YFV__NC_002031.1__SSjev(V3)-prMEdelstem_TM-JEV (polyprotein: aa122-681) (wt)
gggagagcggcucggccauuuugucccagucaguccggaggcugcggcugcagaaguaccgccugcggaguaacugcaaagaagcuuaccaugaaugaaggcucaaucauguggcucgcgagcuuggcaguugucauagcuugugcaggagccgugaccuuggugcggaaaaacagaugguugcuccuaaaugugacaucugaggaccucgggaaaacauucucugugggcacaggcaacugcacaacaaacauuuuggaagccaaguacuggugcccagacucaauggaauacaacugucccaaucucaguccaagagaggagccagaugacauugauugcuggugcuaugggguggaaaacguuagagucgcauaugguaagugugacucagcaggcaggucuaggaggucaagaagggccauugacuugccuacgcaugaaaaccaugguuugaagacccggcaagaaaaauggaugacuggaagaaugggugaaaggcaacuccaaaagauugagagaugguucgugaggaaccccuuuuuugcagugacggcucugaccauugccuaccuugugggaagcaacaugacgcaacgagucgugauugcccuacuggucuuggcuguugguccggccuacucagcucacugcauuggaauuacugacagggauuucauugagggggugcauggaggaacuuggguuucagcuacccuggagcaagacaagugugucacuguuauggccccugacaagccuucauuggacaucucacuagagacaguagccauugauagaccugcugaggugaggaaaguguguuacaaugcaguucucacucaugugaagauuaaugacaagugccccagcacuggagaggcccaccuagcugaagagaacgaaggggacaaugcgugcaagcgcacuuauucugauagaggcuggggcaauggcuguggccuauuugggaaagggagcauuguggcaugcgccaaauucacuugugccaaauccaugaguuuguuugagguugaucagaccaaaauucaguaugucaucagagcacaauugcauguaggggccaagcaggaaaauuggaauaccgacauuaagacucucaaguuugaugcccugucaggcucccaggaagucgaguucauuggguauggaaaagcuacacuggaaugccaggugcaaacugcgguggacuuugguaacaguuacaucgcugagauggaaacagagagcuggauaguggacagacagugggcccaggacuugacccugccauggcagaguggaaguggcgggguguggagagagaugcaucaucuugucgaauuugaaccuccgcaugccgccacuaucagaguacuggcccugggaaaccaggaaggcuccuugaaaacagcucuuacuggcgcaaugaggguuacaaaggacacaaaugacaacaaccuuuacaaacuacaugguggacauguuucuugcagagugaaauugucagcuuugacacucaaggggacauccuacaaaauaugcacugacaaaauguuuuuugucaagaacccaacugacacuggccauggcacuguugugaugcaggugaaagugucaaaaggagcccccugcaggauuccagugauaguagcugaugaucuuacagcggcaaucaauaaaggcauuuugguuacaguuaaccccaucgccucaaccaaugaugaugaagugcugauugaggugaacccaccuuuuggagacagcuacauuaucguugggagaggagauucacgucucacuuaccaguggcacaaagagggaagcucaauaggcagcacgcugggcaaggccuuuucaacaacuuugaagggagcucaaagacuggcagcguugggcgacacagccugggacuuuggcucuauuggaggggucuucaacuccauaggaagagccguucaccaaguguuugguggugccuucagaacacucuuugggggaaugucuuggaucacacaagggcuaaugggugcccuacugcucuggaugggcgucaacgcacgagaccgaucaauugcuuuggccuucuuagccacaggaggugugcucguguucuuagcgaccaaugugcacgccuaaggacuagucccuguucccagagcccacuuuuuuuucuuuuuuugaaauaaaauagccugucuuucagaucuaaaaaaaaaaaaaaaaaaaaaaaaaaaaaaaaaaaaaaaaaaaaaaaaaaaaaaaaaaaaaaaaugcaucccccccccccccccccccccccccccccccaaaggcucuuuucagagccaccagaauu

SEQ ID NO: 1731 - RNA, 2353 nt, Artificial Sequence
  mRNA product Design c-5 comprising derived and/or modified sequence from YFV__NC_002031.1__X-SS-prME (polyprotein: aa92-778) (wt)
gggagagcggcucggccauuuugucccagucaguccggaggcugcggcugcagaaguaccgccugcggaguaacugcaaagaagcuuaccaugagaggauuguccucaaggaaacgccguucccaugauguucugacugugcaauuccuaauuuugggaaugcuguugaugacggguggagugaccuuggugcggaaaaacagaugguugcuccuaaaugugacaucugaggaccucgggaaaacauucucugugggcacaggcaacugcacaacaaacauuuuggaagccaaguacuggugcccagacucaauggaauacaacugucccaaucucaguccaagagaggagccagaugacauugauugcuggugcuaugggguggaaaacguuagagucgcauaugguaagugugacucagcaggcaggucuaggaggucaagaagggccauugacuugccuacgcaugaaaaccaugguuugaagacccggcaagaaaaauggaugacuggaagaaugggugaaaggcaacuccaaaagauugagagaugguucgugaggaaccccuuuuuugcagugacggcucugaccauugccuaccuugugggaagcaacaugacgcaacgagucgugauugcccuacuggucuuggcuguugguccggccuacucagcucacugcauuggaauuacugacagggauuucauugagggggugcauggaggaacuuggguuucagcuacccuggagcaagacaagugugucacuguuauggccccugacaagccuucauuggacaucucacuagagacaguagccauugauagaccugcugaggugaggaaaguguguuacaaugcaguucucacucaugugaagauuaaugacaagugccccagcacuggagaggcccaccuagcugaagagaacgaaggggacaaugcgugcaagcgcacuuauucugauagaggcuggggcaauggcuguggccuauuugggaaagggagcauuguggcaugcgccaaauucacuugugccaaauccaugaguuuguuugagguugaucagaccaaaauucaguaugucaucagagcacaauugcauguaggggccaagcaggaaaauuggaauaccgacauuaagacucucaaguuugaugcccugucaggcucccaggaagucgaguucauuggguauggaaaagcuacacuggaaugccaggugcaaacugcgguggacuuugguaacaguuacaucgcugagauggaaacagagagcuggauaguggacagacagugggcccaggacuugacccugccauggcagaguggaaguggcgggguguggagagagaugcaucaucuugucgaauuugaaccuccgcaugccgccacuaucagaguacuggcccugggaaaccaggaaggcuccuugaaaacagcucuuacuggcgcaaugaggguuacaaaggacacaaaugacaacaaccuuuacaaacuacaugguggacauguuucuugcagagugaaauugucagcuuugacacucaaggggacauccuacaaaauaugcacugacaaaauguuuuuugucaagaacccaacugacacuggccauggcacuguugugaugcaggugaaagugucaaaaggagcccccugcaggauuccagugauaguagcugaugaucuuacagcggcaaucaauaaaggcauuuugguuacaguuaaccccaucgccucaaccaaugaugaugaagugcugauugaggugaacccaccuuuuggagacagcuacauuaucguugggagaggagauucacgucucacuuaccaguggcacaaagagggaagcucaauaggaaaguuguucacucagaccaugaaaggcguggaacgccuggccgucaugggagacaccgccugggauuucagcuccgcuggaggguucuucacuucgguugggaaaggaauccauacgguguuuggcucugccuuucaggggcuauuuggcggcuugaacuggauaacaaaggucaucaugggggcgguacuuauauggguuggcaucaacacaagaaacaugacaauguccaugagcaugaucuugguaggagugaucaugauguuuuugucucuaggaguuggggcguaaggacuagucccuguucccagagcccacuuuuuuuucuuuuuuugaaauaaaauagccugucuuucagaucuaaaaaaaaaaaaaaaaaaaaaaaaaaaaaaaaaaaaaaaaaaaaaaaaaaaaaaaaaaaaaaaaugcaucccccccccccccccccccccccccccccccaaaggcucuuuucagagccaccagaauu

SEQ ID NO: 1732 - RNA, 2356 nt, Artificial Sequence
  mRNA product Design c-5 comprising derived and/or modified sequence from YFV__NC_002031.1__SSjev(V3)-prME-XX (polyprotein: aa122-788) (wt)
gggagagcggcucggccauuuugucccagucaguccggaggcugcggcugcagaaguaccgccugcggaguaacugcaaagaagcuuaccaugaaugaaggcucaaucauguggcucgcgagcuuggcaguugucauagcuugugcaggagccgugaccuuggugcggaaaaacagaugguugcuccuaaaugugacaucugaggaccucgggaaaacauucucugugggcacaggcaacugcacaacaaacauuuuggaagccaaguacuggugcccagacucaauggaauacaacugucccaaucucaguccaagagaggagccagaugacauugauugcuggugcuaugggguggaaaacguuagagucgcauaugguaagugugacucagcaggcaggucuaggaggucaagaagggccauugacuugccuacgcaugaaaaccaugguuugaagacccggcaagaaaaauggaugacuggaagaaugggugaaaggcaacuccaaaagauugagagaugguucgugaggaaccccuuuuuugcagugacggcucugaccauugccuaccuugugggaagcaacaugacgcaacgagucgugauugcccuacuggucuuggcuguugguccggccuacucagcucacugcauuggaauuacugacagggauuucauugagggggugcauggaggaacuuggguuucagcuacccuggagcaagacaagugugucacuguuauggccccugacaagccuucauuggacaucucacuagagacaguagccauugauagaccugcugaggugaggaaaguguguuacaaugcaguucucacucaugugaagauuaaugacaagugccccagcacuggagaggcccaccuagcugaagagaacgaaggggacaaugcgugcaagcgcacuuauucugauagaggcuggggcaauggcuguggccuauuugggaaagggagcauuguggcaugcgccaaauucacuugugccaaauccaugaguuuguuugagguugaucagaccaaaauucaguaugucaucagagcacaauugcauguaggggccaagcaggaaaauuggaauaccgacauuaagacucucaaguuugaugcccugucaggcucccaggaagucgaguucauuggguauggaaaagcuacacuggaaugccaggugcaaacugcgguggacuuugguaacaguuacaucgcugagauggaaacagagagcuggauaguggacagacagugggcccaggacuugacccugccauggcagaguggaaguggcgggguguggagagagaugcaucaucuugucgaauuugaaccuccgcaugccgccacuaucagaguacuggcccugggaaaccaggaaggcuccuugaaaacagcucuuacuggcgcaaugaggguuacaaaggacacaaaugacaacaaccuuuacaaacuacaugguggacauguuucuugcagagugaaauugucagcuuugacacucaaggggacauccuacaaaauaugcacugacaaaauguuuuuugucaagaacccaacugacacuggccauggcacuguugugaugcaggugaaagugucaaaaggagcccccugcaggauuccagugauaguagcugaugaucuuacagcggcaaucaauaaaggcauuuugguuacaguuaaccccaucgccucaaccaaugaugaugaagugcugauugaggugaacccaccuuuuggagacagcuacauuaucguugggagaggagauucacgucucacuuaccaguggcacaaagagggaagcucaauaggaaaguuguucacucagaccaugaaaggcguggaacgccuggccgucaugggagacaccgccugggauuucagcuccgcuggaggguucuucacuucgguugggaaaggaauccauacgguguuuggcucugccuuucaggggcuauuuggcggcuugaacuggauaacaaaggucaucaugggggcgguacuuauauggguuggcaucaacacaagaaacaugacaauguccaugagcaugaucuugguaggagugaucaugauguuuuugucucuaggaguuggggcggaucaaggaugcgccaucaacuuuggcaaguaaggacuagucccuguucccagagcccacuuuuuuuucuuuuuuugaaauaaaauagccugucuuucagaucuaaaaaaaaaaaaaaaaaaaaaaaaaaaaaaaaaaaaaaaaaaaaaaaaaaaaaaaaaaaaaaaaugcaucccccccccccccccccccccccccccccccaaaggcucuuuucagagccaccagaauu

SEQ ID NO: 1733 - RNA, 2365 nt, Artificial Sequence
  mRNA product Design c-5 comprising derived and/or modified sequence from YFV__NC_002031.1__X-SS-prMEdelstem_TM-JEV (polyprotein: aa92-681) (opt1)
gggagagcggcucggccauuuugucccagucaguccggaggcugcggcugcagaaguaccgccugcggaguaacugcaaagaagcuuaccaugcggggccugagcucccgcaagcggcgcagccacgacgugcucaccguccaguuccugauccuggggaugcuccugaugaccggcggggugacgcuggugcggaagaaccgcuggcuccugcugaacgucaccuccgaggaccucggcaagaccuucagcguggggaccggcaacugcacgaccaacauccuggaggccaaguacuggugccccgacuccauggaguacaacugcccgaaccugagcccccgggaggagcccgacgacaucgacugcuggugcuacggcguggagaacguccgcguggccuacgggaagugcgacuccgcgggccggagccgccggucccgccgggccaucgaccuccccacccacgagaaccacgggcugaagacccgccaggagaaguggaugacgggccggaugggggagcgccagcugcagaagaucgagcggugguucgugcgcaacccguucuucgccgucaccgcccucaccaucgccuaccuggugggcagcaacaugacccagcggguggucaucgcgcugcucgugcuggccgugggccccgccuacuccgcccacugcaucgggaucacggaccgcgacuucaucgagggcguccacgggggcaccugggugagcgcgacccuggagcaggacaagugcgugaccgucauggcccccgacaagcccucccucgacaucagccuggagacgguggccaucgaccggccggccgaggugcgcaaggucugcuacaacgccgugcugacccacgugaagaucaacgacaagugccccuccaccggcgaggcgcaccucgccgaggagaacgagggggacaacgccugcaagcggaccuacagcgaccggggcugggggaacggcugcgggcuguucggcaagggcuccaucgucgccugcgccaaguucacgugcgcgaagagcaugucccuguucgagguggaccagaccaagauccaguacgucauccgcgcccagcuccacgugggggccaagcaggagaacuggaacaccgacaucaagacccugaaguucgacgcccugagcggcagccaggagguggaguucaucggguacggcaaggccacgcucgagugccagguccagaccgcgguggacuucgggaacuccuacaucgccgagauggagaccgagagcuggaucguggaccggcagugggcccaggaccugacccugcccuggcaguccggcagcggcggggucuggcgcgagaugcaccaccucguggaguucgagcccccgcacgccgccacgauccgggugcuggcgcugggcaaccaggaggggucccucaagaccgcccugaccggcgccaugcgcgucaccaaggacacgaacgacaacaaccuguacaagcuccacgggggccacgugagcugccgggugaagcuguccgcccugacccucaagggcaccagcuacaagaucugcaccgacaagauguucuucgucaagaaccccacggacaccgggcacggcaccguggugaugcaggucaagguguccaagggggcgcccugccgcaucccggugaucgucgccgacgaccugaccgccgccaucaacaagggcauccuggugaccgugaacccgaucgccagcacgaacgacgacgagguccucaucgaggugaacccccccuucggcgacuccuacaucaucguggggcggggcgacagccgccugaccuaccaguggcacaaggagggguccagcaucggcagcacccuggggaaggccuucuccaccacgcucaagggcgcccagcgccuggcggcccugggggacaccgccugggacuucggcagcaucgggggcguguucaacuccaucggccgggccguccaccagguguucgggggcgccuuccgcacccucuucgggggcaugagcuggaucacccaggggcugaugggcgcgcugcuccuguggaugggggugaacgcccgggaccgcuccaucgcccuggccuuccucgcgacgggcggcguccugguguuccuggccaccaacgugcacgccugaggacuagucccuguucccagagcccacuuuuuuuucuuuuuuugaaauaaaauagccugucuuucagaucuaaaaaaaaaaaaaaaaaaaaaaaaaaaaaaaaaaaaaaaaaaaaaaaaaaaaaaaaaaaaaaaaugcaucccccccccccccccccccccccccccccccaaaggcucuuuucagagccaccagaauu

SEQ ID NO: 1734 - RNA, 2338 nt, Artificial Sequence
  mRNA product Design c-5 comprising derived and/or modified sequence from YFV__NC_002031.1__SSjev(V3)-prMEdelstem_TM-JEV (polyprotein: aa122-681) (opt1)
gggagagcggcucggccauuuugucccagucaguccggaggcugcggcugcagaaguaccgccugcggaguaacugcaaagaagcuuaccaugaacgagggcagcaucauguggcuggccucccucgccguggucaucgcgugcgccggggccgugacgcuggugcggaagaaccgcuggcuccugcugaacgucaccuccgaggaccucggcaagaccuucagcguggggaccggcaacugcacgaccaacauccuggaggccaaguacuggugccccgacuccauggaguacaacugcccgaaccugagcccccgggaggagcccgacgacaucgacugcuggugcuacggcguggagaacguccgcguggccuacgggaagugcgacuccgcgggccggagccgccggucccgccgggccaucgaccuccccacccacgagaaccacgggcugaagacccgccaggagaaguggaugacgggccggaugggggagcgccagcugcagaagaucgagcggugguucgugcgcaacccguucuucgccgucaccgcccucaccaucgccuaccuggugggcagcaacaugacccagcggguggucaucgcgcugcucgugcuggccgugggccccgccuacuccgcccacugcaucgggaucacggaccgcgacuucaucgagggcguccacgggggcaccugggugagcgcgacccuggagcaggacaagugcgugaccgucauggcccccgacaagcccucccucgacaucagccuggagacgguggccaucgaccggccggccgaggugcgcaaggucugcuacaacgccgugcugacccacgugaagaucaacgacaagugccccuccaccggcgaggcgcaccucgccgaggagaacgagggggacaacgccugcaagcggaccuacagcgaccggggcugggggaacggcugcgggcuguucggcaagggcuccaucgucgccugcgccaaguucacgugcgcgaagagcaugucccuguucgagguggaccagaccaagauccaguacgucauccgcgcccagcuccacgugggggccaagcaggagaacuggaacaccgacaucaagacccugaaguucgacgcccugagcggcagccaggagguggaguucaucggguacggcaaggccacgcucgagugccagguccagaccgcgguggacuucgggaacuccuacaucgccgagauggagaccgagagcuggaucguggaccggcagugggcccaggaccugacccugcccuggcaguccggcagcggcggggucuggcgcgagaugcaccaccucguggaguucgagcccccgcacgccgccacgauccgggugcuggcgcugggcaaccaggaggggucccucaagaccgcccugaccggcgccaugcgcgucaccaaggacacgaacgacaacaaccuguacaagcuccacgggggccacgugagcugccgggugaagcuguccgcccugacccucaagggcaccagcuacaagaucugcaccgacaagauguucuucgucaagaaccccacggacaccgggcacggcaccguggugaugcaggucaagguguccaagggggcgcccugccgcaucccggugaucgucgccgacgaccugaccgccgccaucaacaagggcauccuggugaccgugaacccgaucgccagcacgaacgacgacgagguccucaucgaggugaacccccccuucggcgacuccuacaucaucguggggcggggcgacagccgccugaccuaccaguggcacaaggagggguccagcaucggcagcacccuggggaaggccuucuccaccacgcucaagggcgcccagcgccuggcggcccugggggacaccgccugggacuucggcagcaucgggggcguguucaacuccaucggccgggccguccaccagguguucgggggcgccuuccgcacccucuucgggggcaugagcuggaucacccaggggcugaugggcgcgcugcuccuguggaugggggugaacgcccgggaccgcuccaucgcccuggccuuccucgcgacgggcggcguccugguguuccuggccaccaacgugcacgccugaggacuagucccuguucccagagcccacuuuuuuuucuuuuuuugaaauaaaauagccugucuuucagaucuaaaaaaaaaaaaaaaaaaaaaaaaaaaaaaaaaaaaaaaaaaaaaaaaaaaaaaaaaaaaaaaaugcaucccccccccccccccccccccccccccccccaaaggcucuuuucagagccaccagaauu

SEQ ID NO: 1735 - RNA, 2353 nt, Artificial Sequence
  mRNA product Design c-5 comprising derived and/or modified sequence from YFV__NC_002031.1__X-SS-prME (polyprotein: aa92-778) (opt1)
gggagagcggcucggccauuuugucccagucaguccggaggcugcggcugcagaaguaccgccugcggaguaacugcaaagaagcuuaccaugcggggccugagcucccgcaagcggcgcagccacgacgugcucaccguccaguuccugauccuggggaugcuccugaugaccggcggggugacgcuggugcggaagaaccgcuggcuccugcugaacgucaccuccgaggaccucggcaagaccuucagcguggggaccggcaacugcacgaccaacauccuggaggccaaguacuggugccccgacuccauggaguacaacugcccgaaccugagcccccgggaggagcccgacgacaucgacugcuggugcuacggcguggagaacguccgcguggccuacgggaagugcgacuccgcgggccggagccgccggucccgccgggccaucgaccuccccacccacgagaaccacgggcugaagacccgccaggagaaguggaugacgggccggaugggggagcgccagcugcagaagaucgagcggugguucgugcgcaacccguucuucgccgucaccgcccucaccaucgccuaccuggugggcagcaacaugacccagcggguggucaucgcgcugcucgugcuggccgugggccccgccuacuccgcccacugcaucgggaucacggaccgcgacuucaucgagggcguccacgggggcaccugggugagcgcgacccuggagcaggacaagugcgugaccgucauggcccccgacaagcccucccucgacaucagccuggagacgguggccaucgaccggccggccgaggugcgcaaggucugcuacaacgccgugcugacccacgugaagaucaacgacaagugccccuccaccggcgaggcgcaccucgccgaggagaacgagggggacaacgccugcaagcggaccuacagcgaccggggcugggggaacggcugcgggcuguucggcaagggcuccaucgucgccugcgccaaguucacgugcgcgaagagcaugucccuguucgagguggaccagaccaagauccaguacgucauccgcgcccagcuccacgugggggccaagcaggagaacuggaacaccgacaucaagacccugaaguucgacgcccugagcggcagccaggagguggaguucaucggguacggcaaggccacgcucgagugccagguccagaccgcgguggacuucgggaacuccuacaucgccgagauggagaccgagagcuggaucguggaccggcagugggcccaggaccugacccugcccuggcaguccggcagcggcggggucuggcgcgagaugcaccaccucguggaguucgagcccccgcacgccgccacgauccgggugcuggcgcugggcaaccaggaggggucccucaagaccgcccugaccggcgccaugcgcgucaccaaggacacgaacgacaacaaccuguacaagcuccacgggggccacgugagcugccgggugaagcuguccgcccugacccucaagggcaccagcuacaagaucugcaccgacaagauguucuucgucaagaaccccacggacaccgggcacggcaccguggugaugcaggucaagguguccaagggggcgcccugccgcaucccggugaucgucgccgacgaccugaccgccgccaucaacaagggcauccuggugaccgugaacccgaucgccagcacgaacgacgacgagguccucaucgaggugaacccccccuucggcgacuccuacaucaucguggggcggggcgacagccgccugaccuaccaguggcacaaggagggguccagcaucggcaagcuguucacccagaccaugaagggggucgagcggcuggcggugaugggcgacacggccugggacuucuccagcgccggcggguucuucaccuccgugggcaaggggauccacaccgucuucggcagcgccuuccaggggcucuucggcggccugaacuggaucaccaaggugaucaugggggccgugcugaucugggucggcaucaacacgcgcaacaugaccauguccaugagcaugauccucgugggggugaucaugauguuccugagccugggcgucggggcgugaggacuagucccuguucccagagcccacuuuuuuuucuuuuuuugaaauaaaauagccugucuuucagaucuaaaaaaaaaaaaaaaaaaaaaaaaaaaaaaaaaaaaaaaaaaaaaaaaaaaaaaaaaaaaaaaaugcaucccccccccccccccccccccccccccccccaaaggcucuuuucagagccaccagaauu

SEQ ID NO: 1736 - RNA, 2356 nt, Artificial Sequence
  mRNA product Design c-5 comprising derived and/or modified sequence from YFV__NC_002031.1__SSjev(V3)-prME-XX (polyprotein: aa122-788) (opt1)
gggagagcggcucggccauuuugucccagucaguccggaggcugcggcugcagaaguaccgccugcggaguaacugcaaagaagcuuaccaugaacgagggcagcaucauguggcuggccucccucgccguggucaucgcgugcgccggggccgugacgcuggugcggaagaaccgcuggcuccugcugaacgucaccuccgaggaccucggcaagaccuucagcguggggaccggcaacugcacgaccaacauccuggaggccaaguacuggugccccgacuccauggaguacaacugcccgaaccugagcccccgggaggagcccgacgacaucgacugcuggugcuacggcguggagaacguccgcguggccuacgggaagugcgacuccgcgggccggagccgccggucccgccgggccaucgaccuccccacccacgagaaccacgggcugaagacccgccaggagaaguggaugacgggccggaugggggagcgccagcugcagaagaucgagcggugguucgugcgcaacccguucuucgccgucaccgcccucaccaucgccuaccuggugggcagcaacaugacccagcggguggucaucgcgcugcucgugcuggccgugggccccgccuacuccgcccacugcaucgggaucacggaccgcgacuucaucgagggcguccacgggggcaccugggugagcgcgacccuggagcaggacaagugcgugaccgucauggcccccgacaagcccucccucgacaucagccuggagacgguggccaucgaccggccggccgaggugcgcaaggucugcuacaacgccgugcugacccacgugaagaucaacgacaagugccccuccaccggcgaggcgcaccucgccgaggagaacgagggggacaacgccugcaagcggaccuacagcgaccggggcugggggaacggcugcgggcuguucggcaagggcuccaucgucgccugcgccaaguucacgugcgcgaagagcaugucccuguucgagguggaccagaccaagauccaguacgucauccgcgcccagcuccacgugggggccaagcaggagaacuggaacaccgacaucaagacccugaaguucgacgcccugagcggcagccaggagguggaguucaucggguacggcaaggccacgcucgagugccagguccagaccgcgguggacuucgggaacuccuacaucgccgagauggagaccgagagcuggaucguggaccggcagugggcccaggaccugacccugcccuggcaguccggcagcggcggggucuggcgcgagaugcaccaccucguggaguucgagcccccgcacgccgccacgauccgggugcuggcgcugggcaaccaggaggggucccucaagaccgcccugaccggcgccaugcgcgucaccaaggacacgaacgacaacaaccuguacaagcuccacgggggccacgugagcugccgggugaagcuguccgcccugacccucaagggcaccagcuacaagaucugcaccgacaagauguucuucgucaagaaccccacggacaccgggcacggcaccguggugaugcaggucaagguguccaagggggcgcccugccgcaucccggugaucgucgccgacgaccugaccgccgccaucaacaagggcauccuggugaccgugaacccgaucgccagcacgaacgacgacgagguccucaucgaggugaacccccccuucggcgacuccuacaucaucguggggcggggcgacagccgccugaccuaccaguggcacaaggagggguccagcaucggcaagcuguucacccagaccaugaagggggucgagcggcuggcggugaugggcgacacggccugggacuucuccagcgccggcggguucuucaccuccgugggcaaggggauccacaccgucuucggcagcgccuuccaggggcucuucggcggccugaacuggaucaccaaggugaucaugggggccgugcugaucugggucggcaucaacacgcgcaacaugaccauguccaugagcaugauccucgugggggugaucaugauguuccugagccugggcgucggggcggaccagggcugcgccaucaacuucggcaagugaggacuagucccuguucccagagcccacuuuuuuuucuuuuuuugaaauaaaauagccugucuuucagaucuaaaaaaaaaaaaaaaaaaaaaaaaaaaaaaaaaaaaaaaaaaaaaaaaaaaaaaaaaaaaaaaaugcaucccccccccccccccccccccccccccccccaaaggcucuuuucagagccaccagaauu

SEQ ID NO: 1737 - RNA, 2365 nt, Artificial Sequence
  mRNA product Design c-5 comprising derived and/or modified sequence from YFV__NC_002031.1__X-SS-prMEdelstem_TM-JEV (polyprotein: aa92-681) (opt1)
gggagagcggcucggccauuuugucccagucaguccggaggcugcggcugcagaaguaccgccugcggaguaacugcaaagaagcuuaccaugcggggccugagcucccgcaagcggcgcagccacgacgugcucaccguccaguuccugauccuggggaugcuccugaugaccggcggggugacgcuggugcggaagaaccgcuggcuccugcugaacgucaccuccgaggaccucggcaagaccuucagcguggggaccggcaacugcacgaccaacauccuggaggccaaguacuggugccccgacuccauggaguacaacugcccgaaccugagcccccgggaggagcccgacgacaucgacugcuggugcuacggcguggagaacguccgcguggccuacgggaagugcgacuccgcgggccggagccgccggucccgccgggccaucgaccuccccacccacgagaaccacgggcugaagacccgccaggagaaguggaugacgggccggaugggggagcgccagcugcagaagaucgagcggugguucgugcgcaacccguucuucgccgucaccgcccucaccaucgccuaccuggugggcagcaacaugacccagcggguggucaucgcgcugcucgugcuggccgugggccccgccuacuccgcccacugcaucgggaucacggaccgcgacuucaucgagggcguccacgggggcaccugggugagcgcgacccuggagcaggacaagugcgugaccgucauggcccccgacaagcccucccucgacaucagccuggagacgguggccaucgaccggccggccgaggugcgcaaggucugcuacaacgccgugcugacccacgugaagaucaacgacaagugccccuccaccggcgaggcgcaccucgccgaggagaacgagggggacaacgccugcaagcggaccuacagcgaccggggcugggggaacggcugcgggcuguucggcaagggcuccaucgucgccugcgccaaguucacgugcgcgaaguccaugagccuguucgagguggaccagaccaagauccaguacgucauccgcgcccagcuccacgugggggccaagcaggagaacuggaacaccgacaucaagacccugaaguucgacgcccugagcggcagccaggagguggaguucaucggguacggcaaggccacgcucgagugccagguccagaccgcgguggacuucgggaacuccuacaucgccgagauggagaccgagagcuggaucguggaccggcagugggcccaggaccugacccugcccuggcaguccggcagcggcggggucuggcgcgagaugcaccaccucguggaguucgagcccccgcacgccgccacgauccgggugcuggcgcugggcaaccaggaggggucccucaagaccgcccugaccggcgccaugcgcgucaccaaggacacgaacgacaacaaccuguacaagcuccacgggggccacgugagcugccgggugaagcuguccgcccugacccucaagggcaccagcuacaagaucugcaccgacaagauguucuucgucaagaaccccacggacaccgggcacggcaccguggugaugcaggucaagguguccaagggggcgcccugccgcaucccggugaucgucgccgacgaccugaccgccgccaucaacaagggcauccuggugaccgugaacccgaucgccagcacgaacgacgacgagguccucaucgaggugaacccccccuucggcgacuccuacaucaucguggggcggggcgacagccgccugaccuaccaguggcacaaggagggguccagcaucggcagcacccuggggaaggccuucuccaccacgcucaagggcgcccagcgccuggcggcccugggggacaccgccugggacuucggcagcaucgggggcguguucaacuccaucggccgggccguccaccagguguucgggggcgccuuccgcacccucuucgggggcaugagcuggaucacccaggggcugaugggcgcgcugcuccuguggaugggggugaacgcccgggaccgcuccaucgcccuggccuuccucgcgacgggcggcguccugguguuccuggccaccaacgugcacgccugaggacuagucccuguucccagagcccacuuuuuuuucuuuuuuugaaauaaaauagccugucuuucagaucuaaaaaaaaaaaaaaaaaaaaaaaaaaaaaaaaaaaaaaaaaaaaaaaaaaaaaaaaaaaaaaaaugcaucccccccccccccccccccccccccccccccaaaggcucuuuucagagccaccagaauu

SEQ ID NO: 1738 - RNA, 2338 nt, Artificial Sequence
  mRNA product Design c-5 comprising derived and/or modified sequence from YFV__NC_002031.1__SSjev(V3)-prMEdelstem_TM-JEV (polyprotein: aa122-681) (opt1)
gggagagcggcucggccauuuugucccagucaguccggaggcugcggcugcagaaguaccgccugcggaguaacugcaaagaagcuuaccaugaacgagggcagcaucauguggcuggccucccucgccguggucaucgcgugcgccggggccgugacgcuggugcggaagaaccgcuggcuccugcugaacgucaccuccgaggaccucggcaagaccuucagcguggggaccggcaacugcacgaccaacauccuggaggccaaguacuggugccccgacuccauggaguacaacugcccgaaccugagcccccgggaggagcccgacgacaucgacugcuggugcuacggcguggagaacguccgcguggccuacgggaagugcgacuccgcgggccggagccgccggucccgccgggccaucgaccuccccacccacgagaaccacgggcugaagacccgccaggagaaguggaugacgggccggaugggggagcgccagcugcagaagaucgagcggugguucgugcgcaacccguucuucgccgucaccgcccucaccaucgccuaccuggugggcagcaacaugacccagcggguggucaucgcgcugcucgugcuggccgugggccccgccuacuccgcccacugcaucgggaucacggaccgcgacuucaucgagggcguccacgggggcaccugggugagcgcgacccuggagcaggacaagugcgugaccgucauggcccccgacaagcccucccucgacaucagccuggagacgguggccaucgaccggccggccgaggugcgcaaggucugcuacaacgccgugcugacccacgugaagaucaacgacaagugccccuccaccggcgaggcgcaccucgccgaggagaacgagggggacaacgccugcaagcggaccuacagcgaccggggcugggggaacggcugcgggcuguucggcaagggcuccaucgucgccugcgccaaguucacgugcgcgaaguccaugagccuguucgagguggaccagaccaagauccaguacgucauccgcgcccagcuccacgugggggccaagcaggagaacuggaacaccgacaucaagacccugaaguucgacgcccugagcggcagccaggagguggaguucaucggguacggcaaggccacgcucgagugccagguccagaccgcgguggacuucgggaacuccuacaucgccgagauggagaccgagagcuggaucguggaccggcagugggcccaggaccugacccugcccuggcaguccggcagcggcggggucuggcgcgagaugcaccaccucguggaguucgagcccccgcacgccgccacgauccgggugcuggcgcugggcaaccaggaggggucccucaagaccgcccugaccggcgccaugcgcgucaccaaggacacgaacgacaacaaccuguacaagcuccacgggggccacgugagcugccgggugaagcuguccgcccugacccucaagggcaccagcuacaagaucugcaccgacaagauguucuucgucaagaaccccacggacaccgggcacggcaccguggugaugcaggucaagguguccaagggggcgcccugccgcaucccggugaucgucgccgacgaccugaccgccgccaucaacaagggcauccuggugaccgugaacccgaucgccagcacgaacgacgacgagguccucaucgaggugaacccccccuucggcgacuccuacaucaucguggggcggggcgacagccgccugaccuaccaguggcacaaggagggguccagcaucggcagcacccuggggaaggccuucuccaccacgcucaagggcgcccagcgccuggcggcccugggggacaccgccugggacuucggcagcaucgggggcguguucaacuccaucggccgggccguccaccagguguucgggggcgccuuccgcacccucuucgggggcaugagcuggaucacccaggggcugaugggcgcgcugcuccuguggaugggggugaacgcccgggaccgcuccaucgcccuggccuuccucgcgacgggcggcguccugguguuccuggccaccaacgugcacgccugaggacuagucccuguucccagagcccacuuuuuuuucuuuuuuugaaauaaaauagccugucuuucagaucuaaaaaaaaaaaaaaaaaaaaaaaaaaaaaaaaaaaaaaaaaaaaaaaaaaaaaaaaaaaaaaaaugcaucccccccccccccccccccccccccccccccaaaggcucuuuucagagccaccagaauu

SEQ ID NO: 1739 - RNA, 2353 nt, Artificial Sequence
  mRNA product Design c-5 comprising derived and/or modified sequence from YFV__NC_002031.1__X-SS-prME (polyprotein: aa92-778) (opt1)
gggagagcggcucggccauuuugucccagucaguccggaggcugcggcugcagaaguaccgccugcggaguaacugcaaagaagcuuaccaugcggggccugagcucccgcaagcggcgcagccacgacgugcucaccguccaguuccugauccuggggaugcuccugaugaccggcggggugacgcuggugcggaagaaccgcuggcuccugcugaacgucaccuccgaggaccucggcaagaccuucagcguggggaccggcaacugcacgaccaacauccuggaggccaaguacuggugccccgacuccauggaguacaacugcccgaaccugagcccccgggaggagcccgacgacaucgacugcuggugcuacggcguggagaacguccgcguggccuacgggaagugcgacuccgcgggccggagccgccggucccgccgggccaucgaccuccccacccacgagaaccacgggcugaagacccgccaggagaaguggaugacgggccggaugggggagcgccagcugcagaagaucgagcggugguucgugcgcaacccguucuucgccgucaccgcccucaccaucgccuaccuggugggcagcaacaugacccagcggguggucaucgcgcugcucgugcuggccgugggccccgccuacuccgcccacugcaucgggaucacggaccgcgacuucaucgagggcguccacgggggcaccugggugagcgcgacccuggagcaggacaagugcgugaccgucauggcccccgacaagcccucccucgacaucagccuggagacgguggccaucgaccggccggccgaggugcgcaaggucugcuacaacgccgugcugacccacgugaagaucaacgacaagugccccuccaccggcgaggcgcaccucgccgaggagaacgagggggacaacgccugcaagcggaccuacagcgaccggggcugggggaacggcugcgggcuguucggcaagggcuccaucgucgccugcgccaaguucacgugcgcgaaguccaugagccuguucgagguggaccagaccaagauccaguacgucauccgcgcccagcuccacgugggggccaagcaggagaacuggaacaccgacaucaagacccugaaguucgacgcccugagcggcagccaggagguggaguucaucggguacggcaaggccacgcucgagugccagguccagaccgcgguggacuucgggaacuccuacaucgccgagauggagaccgagagcuggaucguggaccggcagugggcccaggaccugacccugcccuggcaguccggcagcggcggggucuggcgcgagaugcaccaccucguggaguucgagcccccgcacgccgccacgauccgggugcuggcgcugggcaaccaggaggggucccucaagaccgcccugaccggcgccaugcgcgucaccaaggacacgaacgacaacaaccuguacaagcuccacgggggccacgugagcugccgggugaagcuguccgcccugacccucaagggcaccagcuacaagaucugcaccgacaagauguucuucgucaagaaccccacggacaccgggcacggcaccguggugaugcaggucaagguguccaagggggcgcccugccgcaucccggugaucgucgccgacgaccugaccgccgccaucaacaagggcauccuggugaccgugaacccgaucgccagcacgaacgacgacgagguccucaucgaggugaacccccccuucggcgacuccuacaucaucguggggcggggcgacagccgccugaccuaccaguggcacaaggagggguccagcaucggcaagcuguucacccagaccaugaagggggucgagcggcuggcggugaugggcgacacggccugggacuucuccagcgccggcggguucuucaccuccgugggcaaggggauccacaccgucuucggcagcgccuuccaggggcuguucggcggccucaacuggaucaccaaggugaucaugggggccgugcugaucugggucggcaucaacacgcgcaacaugaccauguccaugagcaugauccucgugggggugaucaugauguuccugagccugggcgucggggcgugaggacuagucccuguucccagagcccacuuuuuuuucuuuuuuugaaauaaaauagccugucuuucagaucuaaaaaaaaaaaaaaaaaaaaaaaaaaaaaaaaaaaaaaaaaaaaaaaaaaaaaaaaaaaaaaaaugcaucccccccccccccccccccccccccccccccaaaggcucuuuucagagccaccagaauu

SEQ ID NO: 1740 - RNA, 2356 nt, Artificial Sequence
  mRNA product Design c-5 comprising derived and/or modified sequence from YFV__NC_002031.1__SSjev(V3)-prME-XX (polyprotein: aa122-788) (opt1)
gggagagcggcucggccauuuugucccagucaguccggaggcugcggcugcagaaguaccgccugcggaguaacugcaaagaagcuuaccaugaacgagggcagcaucauguggcuggccucccucgccguggucaucgcgugcgccggggccgugacgcuggugcggaagaaccgcuggcuccugcugaacgucaccuccgaggaccucggcaagaccuucagcguggggaccggcaacugcacgaccaacauccuggaggccaaguacuggugccccgacuccauggaguacaacugcccgaaccugagcccccgggaggagcccgacgacaucgacugcuggugcuacggcguggagaacguccgcguggccuacgggaagugcgacuccgcgggccggagccgccggucccgccgggccaucgaccuccccacccacgagaaccacgggcugaagacccgccaggagaaguggaugacgggccggaugggggagcgccagcugcagaagaucgagcggugguucgugcgcaacccguucuucgccgucaccgcccucaccaucgccuaccuggugggcagcaacaugacccagcggguggucaucgcgcugcucgugcuggccgugggccccgccuacuccgcccacugcaucgggaucacggaccgcgacuucaucgagggcguccacgggggcaccugggugagcgcgacccuggagcaggacaagugcgugaccgucauggcccccgacaagcccucccucgacaucagccuggagacgguggccaucgaccggccggccgaggugcgcaaggucugcuacaacgccgugcugacccacgugaagaucaacgacaagugccccuccaccggcgaggcgcaccucgccgaggagaacgagggggacaacgccugcaagcggaccuacagcgaccggggcugggggaacggcugcgggcuguucggcaagggcuccaucgucgccugcgccaaguucacgugcgcgaaguccaugagccuguucgagguggaccagaccaagauccaguacgucauccgcgcccagcuccacgugggggccaagcaggagaacuggaacaccgacaucaagacccugaaguucgacgcccugagcggcagccaggagguggaguucaucggguacggcaaggccacgcucgagugccagguccagaccgcgguggacuucgggaacuccuacaucgccgagauggagaccgagagcuggaucguggaccggcagugggcccaggaccugacccugcccuggcaguccggcagcggcggggucuggcgcgagaugcaccaccucguggaguucgagcccccgcacgccgccacgauccgggugcuggcgcugggcaaccaggaggggucccucaagaccgcccugaccggcgccaugcgcgucaccaaggacacgaacgacaacaaccuguacaagcuccacgggggccacgugagcugccgggugaagcuguccgcccugacccucaagggcaccagcuacaagaucugcaccgacaagauguucuucgucaagaaccccacggacaccgggcacggcaccguggugaugcaggucaagguguccaagggggcgcccugccgcaucccggugaucgucgccgacgaccugaccgccgccaucaacaagggcauccuggugaccgugaacccgaucgccagcacgaacgacgacgagguccucaucgaggugaacccccccuucggcgacuccuacaucaucguggggcggggcgacagccgccugaccuaccaguggcacaaggagggguccagcaucggcaagcuguucacccagaccaugaagggggucgagcggcuggcggugaugggcgacacggccugggacuucuccagcgccggcggguucuucaccuccgugggcaaggggauccacaccgucuucggcagcgccuuccaggggcuguucggcggccucaacuggaucaccaaggugaucaugggggccgugcugaucugggucggcaucaacacgcgcaacaugaccauguccaugagcaugauccucgugggggugaucaugauguuccugagccugggcgucggggcggaccagggcugcgccaucaacuucggcaagugaggacuagucccuguucccagagcccacuuuuuuuucuuuuuuugaaauaaaauagccugucuuucagaucuaaaaaaaaaaaaaaaaaaaaaaaaaaaaaaaaaaaaaaaaaaaaaaaaaaaaaaaaaaaaaaaaugcaucccccccccccccccccccccccccccccccaaaggcucuuuucagagccaccagaauu

SEQ ID NO: 1741 - RNA, 2365 nt, Artificial Sequence
  mRNA product Design c-5 comprising derived and/or modified sequence from YFV__NC_002031.1__X-SS-prMEdelstem_TM-JEV (polyprotein: aa92-681) (opt1)
gggagagcggcucggccauuuugucccagucaguccggaggcugcggcugcagaaguaccgccugcggaguaacugcaaagaagcuuaccaugcggggccugagcucccgcaagcggcgcagccacgacgugcucaccguccaguuccugauccuggggaugcuccugaugaccggcggggugacgcuggugcggaagaaccgcuggcuccugcugaacgucaccuccgaggaccucggcaagaccuucagcguggggaccggcaacugcacgaccaacauccuggaggccaaguacuggugccccgacuccauggaguacaacugccccaaccugagcccccgggaggagcccgacgacaucgacugcuggugcuacggcguggagaacguccgcguggccuacgggaagugcgacuccgcgggccggagccgccggucccgccgggccaucgaccuccccacccacgagaaccacgggcugaagacccgccaggagaaguggaugacgggccggaugggggagcgccagcugcagaagaucgagcggugguucgugcgcaacccguucuucgccgucaccgcccucaccaucgccuaccuggugggcagcaacaugacccagcggguggucaucgcgcugcucgugcuggccgugggccccgccuacuccgcccacugcaucgggaucacggaccgcgacuucaucgagggcguccacgggggcaccugggugagcgcgacccuggagcaggacaagugcgugaccgucauggcccccgacaagcccucccucgacaucagccuggagacgguggccaucgaccggccggccgaggugcgcaaggucugcuacaacgccgugcugacccacgugaagaucaacgacaagugccccuccaccggcgaggcgcaccucgccgaggagaacgagggggacaacgccugcaagcggaccuacagcgaccggggcugggggaacggcugcgggcuguucggcaagggcuccaucgucgccugcgccaaguucacgugcgcgaaguccaugagccuguucgagguggaccagaccaagauccaguacgucauccgcgcccagcuccacgugggggccaagcaggagaacuggaacaccgacaucaagacccugaaguucgacgcccugagcggcagccaggagguggaguucaucggguacggcaaggccacgcucgagugccagguccagaccgcgguggacuucgggaacuccuacaucgccgagauggagaccgagagcuggaucguggaccggcagugggcccaggaccugacccugcccuggcaguccggcagcggcggggucuggcgcgagaugcaccaccucguggaguucgagcccccgcacgccgccacgauccgggugcuggcgcugggcaaccaggaggggucccucaagaccgcccugaccggcgccaugcgcgucaccaaggacacgaacgacaacaaccuguacaagcuccacgggggccacgugagcugccgggugaagcuguccgcccugacccucaagggcaccagcuacaagaucugcaccgacaagauguucuucgucaagaaccccacggacaccgggcacggcaccguggugaugcaggucaagguguccaagggggcgcccugccgcaucccggugaucgucgccgacgaccugaccgccgccaucaacaagggcauccuggugaccgugaacccgaucgccagcacgaacgacgacgagguccucaucgaggugaacccgcccuucggcgacuccuacaucaucguggggcggggcgacagccgccugaccuaccaguggcacaaggagggguccagcaucggaagcacgcugggcaaggccuuuucaacaacuuugaagggagcucaaagacuggcagcguugggcgacacagccugggacuuuggcucuauuggaggggucuucaacuccauagguagagccguucaccaaguguuuggaggugccuucagaacacucuuugggggaaugucuuggaucacacaagggcuaaugggugcccuacugcucuggaugggcgucaacgcacgagaccgaucaauugcuuuggccuucuuagccacaggaggugugcucguguucuuagcgaccaaugugcacgccugaggacuagucccuguucccagagcccacuuuuuuuucuuuuuuugaaauaaaauagccugucuuucagaucuaaaaaaaaaaaaaaaaaaaaaaaaaaaaaaaaaaaaaaaaaaaaaaaaaaaaaaaaaaaaaaaaugcaucccccccccccccccccccccccccccccccaaaggcucuuuucagagccaccagaauu

SEQ ID NO: 1742 - RNA, 2338 nt, Artificial Sequence
  mRNA product Design c-5 comprising derived and/or modified sequence from YFV__NC_002031.1__SSjev(V3)-prMEdelstem_TM-JEV (polyprotein: aa122-681) (opt1)
gggagagcggcucggccauuuugucccagucaguccggaggcugcggcugcagaaguaccgccugcggaguaacugcaaagaagcuuaccaugaacgagggcagcaucauguggcuggccucccucgccguggucaucgcgugcgccggggccgugacgcuggugcggaagaaccgcuggcuccugcugaacgucaccuccgaggaccucggcaagaccuucagcguggggaccggcaacugcacgaccaacauccuggaggccaaguacuggugccccgacuccauggaguacaacugccccaaccugagcccccgggaggagcccgacgacaucgacugcuggugcuacggcguggagaacguccgcguggccuacgggaagugcgacuccgcgggccggagccgccggucccgccgggccaucgaccuccccacccacgagaaccacgggcugaagacccgccaggagaaguggaugacgggccggaugggggagcgccagcugcagaagaucgagcggugguucgugcgcaacccguucuucgccgucaccgcccucaccaucgccuaccuggugggcagcaacaugacccagcggguggucaucgcgcugcucgugcuggccgugggccccgccuacuccgcccacugcaucgggaucacggaccgcgacuucaucgagggcguccacgggggcaccugggugagcgcgacccuggagcaggacaagugcgugaccgucauggcccccgacaagcccucccucgacaucagccuggagacgguggccaucgaccggccggccgaggugcgcaaggucugcuacaacgccgugcugacccacgugaagaucaacgacaagugccccuccaccggcgaggcgcaccucgccgaggagaacgagggggacaacgccugcaagcggaccuacagcgaccggggcugggggaacggcugcgggcuguucggcaagggcuccaucgucgccugcgccaaguucacgugcgcgaaguccaugagccuguucgagguggaccagaccaagauccaguacgucauccgcgcccagcuccacgugggggccaagcaggagaacuggaacaccgacaucaagacccugaaguucgacgcccugagcggcagccaggagguggaguucaucggguacggcaaggccacgcucgagugccagguccagaccgcgguggacuucgggaacuccuacaucgccgagauggagaccgagagcuggaucguggaccggcagugggcccaggaccugacccugcccuggcaguccggcagcggcggggucuggcgcgagaugcaccaccucguggaguucgagcccccgcacgccgccacgauccgggugcuggcgcugggcaaccaggaggggucccucaagaccgcccugaccggcgccaugcgcgucaccaaggacacgaacgacaacaaccuguacaagcuccacgggggccacgugagcugccgggugaagcuguccgcccugacccucaagggcaccagcuacaagaucugcaccgacaagauguucuucgucaagaaccccacggacaccgggcacggcaccguggugaugcaggucaagguguccaagggggcgcccugccgcaucccggugaucgucgccgacgaccugaccgccgccaucaacaagggcauccuggugaccgugaacccgaucgccagcacgaacgacgacgagguccucaucgaggugaacccgcccuucggcgacuccuacaucaucguggggcggggcgacagccgccugaccuaccaguggcacaaggagggguccagcaucggcagcacccuggggaaggccuucuccaccacgcucaagggcgcccagcgccuggcggcccugggggacaccgccugggacuucggcagcaucgggggcguguucaacuccaucggccgggccguccaccagguguucgggggcgccuuccgcacccucuucgggggcaugagcuggaucacccaggggcugaugggcgcgcugcuccuguggaugggggugaacgcccgggaccgcuccaucgcccuggccuuccucgcgacgggcggcguccugguguuccuggccaccaacgugcacgccugaggacuagucccuguucccagagcccacuuuuuuuucuuuuuuugaaauaaaauagccugucuuucagaucuaaaaaaaaaaaaaaaaaaaaaaaaaaaaaaaaaaaaaaaaaaaaaaaaaaaaaaaaaaaaaaaaugcaucccccccccccccccccccccccccccccccaaaggcucuuuucagagccaccagaauu

SEQ ID NO: 1743 - RNA, 2353 nt, Artificial Sequence
  mRNA product Design c-5 comprising derived and/or modified sequence from YFV__NC_002031.1__X-SS-prME (polyprotein: aa92-778) (opt1)
gggagagcggcucggccauuuugucccagucaguccggaggcugcggcugcagaaguaccgccugcggaguaacugcaaagaagcuuaccaugcggggccugagcucccgcaagcggcgcagccacgacgugcucaccguccaguuccugauccuggggaugcuccugaugaccggcggggugacgcuggugcggaagaaccgcuggcuccugcugaacgucaccuccgaggaccucggcaagaccuucagcguggggaccggcaacugcacgaccaacauccuggaggccaaguacuggugccccgacuccauggaguacaacugccccaaccugagcccccgggaggagcccgacgacaucgacugcuggugcuacggcguggagaacguccgcguggccuacgggaagugcgacuccgcgggccggagccgccggucccgccgggccaucgaccuccccacccacgagaaccacgggcugaagacccgccaggagaaguggaugacgggccggaugggggagcgccagcugcagaagaucgagcggugguucgugcgcaacccguucuucgccgucaccgcccucaccaucgccuaccuggugggcagcaacaugacccagcggguggucaucgcgcugcucgugcuggccgugggccccgccuacuccgcccacugcaucgggaucacggaccgcgacuucaucgagggcguccacgggggcaccugggugagcgcgacccuggagcaggacaagugcgugaccgucauggcccccgacaagcccucccucgacaucagccuggagacgguggccaucgaccggccggccgaggugcgcaaggucugcuacaacgccgugcugacccacgugaagaucaacgacaagugccccuccaccggcgaggcgcaccucgccgaggagaacgagggggacaacgccugcaagcggaccuacagcgaccggggcugggggaacggcugcgggcuguucggcaagggcuccaucgucgccugcgccaaguucacgugcgcgaaguccaugagccuguucgagguggaccagaccaagauccaguacgucauccgcgcccagcuccacgugggggccaagcaggagaacuggaacaccgacaucaagacccugaaguucgacgcccugagcggcagccaggagguggaguucaucggguacggcaaggccacgcucgagugccagguccagaccgcgguggacuucgggaacuccuacaucgccgagauggagaccgagagcuggaucguggaccggcagugggcccaggaccugacccugcccuggcaguccggcagcggcggggucuggcgcgagaugcaccaccucguggaguucgagcccccgcacgccgccacgauccgggugcuggcgcugggcaaccaggaggggucccucaagaccgcccugaccggcgccaugcgcgucaccaaggacacgaacgacaacaaccuguacaagcuccacgggggccacgugagcugccgggugaagcuguccgcccugacccucaagggcaccagcuacaagaucugcaccgacaagauguucuucgucaagaaccccacggacaccgggcacggcaccguggugaugcaggucaagguguccaagggggcgcccugccgcaucccggugaucgucgccgacgaccugaccgccgccaucaacaagggcauccuggugaccgugaacccgaucgccagcacgaacgacgacgagguccucaucgaggugaacccgcccuucggcgacuccuacaucaucguggggcggggcgacagccgccugaccuaccaguggcacaaggagggguccagcaucggcaagcuguucacccagaccaugaagggggucgagcggcuggcggugaugggcgacacggccugggacuucuccagcgccggcggguucuucaccuccgugggcaaggggauccacaccgucuucggcagcgccuuccaggggcuguucggcggccucaacuggaucaccaaggugaucaugggggccgugcugaucugggucggcaucaacacgcgcaacaugaccauguccaugagcaugauccucgugggggugaucaugauguuccugagccugggcgucggggcgugaggacuagucccuguucccagagcccacuuuuuuuucuuuuuuugaaauaaaauagccugucuuucagaucuaaaaaaaaaaaaaaaaaaaaaaaaaaaaaaaaaaaaaaaaaaaaaaaaaaaaaaaaaaaaaaaaugcaucccccccccccccccccccccccccccccccaaaggcucuuuucagagccaccagaauu

SEQ ID NO: 1744 - RNA, 2356 nt, Artificial Sequence
  mRNA product Design c-5 comprising derived and/or modified sequence from YFV__NC_002031.1__SSjev(V3)-prME-XX (polyprotein: aa122-788) (opt1)
gggagagcggcucggccauuuugucccagucaguccggaggcugcggcugcagaaguaccgccugcggaguaacugcaaagaagcuuaccaugaacgagggcagcaucauguggcuggccucccucgccguggucaucgcgugcgccggggccgugacgcuggugcggaagaaccgcuggcuccugcugaacgucaccuccgaggaccucggcaagaccuucagcguggggaccggcaacugcacgaccaacauccuggaggccaaguacuggugccccgacuccauggaguacaacugccccaaccugagcccccgggaggagcccgacgacaucgacugcuggugcuacggcguggagaacguccgcguggccuacgggaagugcgacuccgcgggccggagccgccggucccgccgggccaucgaccuccccacccacgagaaccacgggcugaagacccgccaggagaaguggaugacgggccggaugggggagcgccagcugcagaagaucgagcggugguucgugcgcaacccguucuucgccgucaccgcccucaccaucgccuaccuggugggcagcaacaugacccagcggguggucaucgcgcugcucgugcuggccgugggccccgccuacuccgcccacugcaucgggaucacggaccgcgacuucaucgagggcguccacgggggcaccugggugagcgcgacccuggagcaggacaagugcgugaccgucauggcccccgacaagcccucccucgacaucagccuggagacgguggccaucgaccggccggccgaggugcgcaaggucugcuacaacgccgugcugacccacgugaagaucaacgacaagugccccuccaccggcgaggcgcaccucgccgaggagaacgagggggacaacgccugcaagcggaccuacagcgaccggggcugggggaacggcugcgggcuguucggcaagggcuccaucgucgccugcgccaaguucacgugcgcgaaguccaugagccuguucgagguggaccagaccaagauccaguacgucauccgcgcccagcuccacgugggggccaagcaggagaacuggaacaccgacaucaagacccugaaguucgacgcccugagcggcagccaggagguggaguucaucggguacggcaaggccacgcucgagugccagguccagaccgcgguggacuucgggaacuccuacaucgccgagauggagaccgagagcuggaucguggaccggcagugggcccaggaccugacccugcccuggcaguccggcagcggcggggucuggcgcgagaugcaccaccucguggaguucgagcccccgcacgccgccacgauccgggugcuggcgcugggcaaccaggaggggucccucaagaccgcccugaccggcgccaugcgcgucaccaaggacacgaacgacaacaaccuguacaagcuccacgggggccacgugagcugccgggugaagcuguccgcccugacccucaagggcaccagcuacaagaucugcaccgacaagauguucuucgucaagaaccccacggacaccgggcacggcaccguggugaugcaggucaagguguccaagggggcgcccugccgcaucccggugaucgucgccgacgaccugaccgccgccaucaacaagggcauccuggugaccgugaacccgaucgccagcacgaacgacgacgagguccucaucgaggugaacccgcccuucggcgacuccuacaucaucguggggcggggcgacagccgccugaccuaccaguggcacaaggagggguccagcaucggcaagcuguucacccagaccaugaagggggucgagcggcuggcggugaugggcgacacggccugggacuucuccagcgccggcggguucuucaccuccgugggcaaggggauccacaccgucuucggcagcgccuuccaggggcuguucggcggccucaacuggaucaccaaggugaucaugggggccgugcugaucugggucggcaucaacacgcgcaacaugaccauguccaugagcaugauccucgugggggugaucaugauguuccugagccugggcgucggggcggaccagggcugcgccaucaacuucggcaagugaggacuagucccuguucccagagcccacuuuuuuuucuuuuuuugaaauaaaauagccugucuuucagaucuaaaaaaaaaaaaaaaaaaaaaaaaaaaaaaaaaaaaaaaaaaaaaaaaaaaaaaaaaaaaaaaaugcaucccccccccccccccccccccccccccccccaaaggcucuuuucagagccaccagaauu

SEQ ID NO: 1745 - RNA, 2365 nt, Artificial Sequence
  mRNA product Design c-5 comprising derived and/or modified sequence from YFV__NC_002031.1__X-SS-prMEdelstem_TM-JEV (polyprotein: aa92-681) (opt2)
gggagagcggcucggccauuuugucccagucaguccggaggcugcggcugcagaaguaccgccugcggaguaacugcaaagaagcuuaccaugcgcggccucuccucccgcaagcgccgcucccacgacguccucaccguccaguuccucauccucggcaugcuccucaugaccggcggcgucacccucguccgcaagaaccgcuggcuccuccucaacgucaccuccgaggaccucggcaagaccuucuccgucggcaccggcaacugcaccaccaacauccucgaggccaaguacuggugccccgacuccauggaguacaacugccccaaccucuccccccgcgaggagcccgacgacaucgacugcuggugcuacggcgucgagaacguccgcgucgccuacggcaagugcgacuccgccggccgcucccgccgcucccgccgcgccaucgaccuccccacccacgagaaccacggccucaagacccgccaggagaaguggaugaccggccgcaugggcgagcgccagcuccagaagaucgagcgcugguucguccgcaaccccuucuucgccgucaccgcccucaccaucgccuaccucgucggcuccaacaugacccagcgcgucgucaucgcccuccucguccucgccgucggccccgccuacuccgcccacugcaucggcaucaccgaccgcgacuucaucgagggcguccacggcggcaccugggucuccgccacccucgagcaggacaagugcgucaccgucauggcccccgacaagcccucccucgacaucucccucgagaccgucgccaucgaccgccccgccgagguccgcaaggucugcuacaacgccguccucacccacgucaagaucaacgacaagugccccuccaccggcgaggcccaccucgccgaggagaacgagggcgacaacgccugcaagcgcaccuacuccgaccgcggcuggggcaacggcugcggccucuucggcaagggcuccaucgucgccugcgccaaguucaccugcgccaaguccaugucccucuucgaggucgaccagaccaagauccaguacgucauccgcgcccagcuccacgucggcgccaagcaggagaacuggaacaccgacaucaagacccucaaguucgacgcccucuccggcucccaggaggucgaguucaucggcuacggcaaggccacccucgagugccagguccagaccgccgucgacuucggcaacuccuacaucgccgagauggagaccgaguccuggaucgucgaccgccagugggcccaggaccucacccuccccuggcaguccggcuccggcggcgucuggcgcgagaugcaccaccucgucgaguucgagcccccccacgccgccaccauccgcguccucgcccucggcaaccaggagggcucccucaagaccgcccucaccggcgccaugcgcgucaccaaggacaccaacgacaacaaccucuacaagcuccacggcggccacgucuccugccgcgucaagcucuccgcccucacccucaagggcaccuccuacaagaucugcaccgacaagauguucuucgucaagaaccccaccgacaccggccacggcaccgucgucaugcaggucaaggucuccaagggcgcccccugccgcauccccgucaucgucgccgacgaccucaccgccgccaucaacaagggcauccucgucaccgucaaccccaucgccuccaccaacgacgacgagguccucaucgaggucaacccccccuucggcgacuccuacaucaucgucggccgcggcgacucccgccucaccuaccaguggcacaaggagggcuccuccaucggcuccacccucggcaaggccuucuccaccacccucaagggcgcccagcgccucgccgcccucggcgacaccgccugggacuucggcuccaucggcggcgucuucaacuccaucggccgcgccguccaccaggucuucggcggcgccuuccgcacccucuucggcggcauguccuggaucacccagggccucaugggcgcccuccuccucuggaugggcgucaacgcccgcgaccgcuccaucgcccucgccuuccucgccaccggcggcguccucgucuuccucgccaccaacguccacgccugaggacuagucccuguucccagagcccacuuuuuuuucuuuuuuugaaauaaaauagccugucuuucagaucuaaaaaaaaaaaaaaaaaaaaaaaaaaaaaaaaaaaaaaaaaaaaaaaaaaaaaaaaaaaaaaaaugcaucccccccccccccccccccccccccccccccaaaggcucuuuucagagccaccagaauu

SEQ ID NO: 1746 - RNA, 2338 nt, Artificial Sequence
  mRNA product Design c-5 comprising derived and/or modified sequence from YFV__NC_002031.1__SSjev(V3)-prMEdelstem_TM-JEV (polyprotein: aa122-681) (opt2)
gggagagcggcucggccauuuugucccagucaguccggaggcugcggcugcagaaguaccgccugcggaguaacugcaaagaagcuuaccaugaacgagggcuccaucauguggcucgccucccucgccgucgucaucgccugcgccggcgccgucacccucguccgcaagaaccgcuggcuccuccucaacgucaccuccgaggaccucggcaagaccuucuccgucggcaccggcaacugcaccaccaacauccucgaggccaaguacuggugccccgacuccauggaguacaacugccccaaccucuccccccgcgaggagcccgacgacaucgacugcuggugcuacggcgucgagaacguccgcgucgccuacggcaagugcgacuccgccggccgcucccgccgcucccgccgcgccaucgaccuccccacccacgagaaccacggccucaagacccgccaggagaaguggaugaccggccgcaugggcgagcgccagcuccagaagaucgagcgcugguucguccgcaaccccuucuucgccgucaccgcccucaccaucgccuaccucgucggcuccaacaugacccagcgcgucgucaucgcccuccucguccucgccgucggccccgccuacuccgcccacugcaucggcaucaccgaccgcgacuucaucgagggcguccacggcggcaccugggucuccgccacccucgagcaggacaagugcgucaccgucauggcccccgacaagcccucccucgacaucucccucgagaccgucgccaucgaccgccccgccgagguccgcaaggucugcuacaacgccguccucacccacgucaagaucaacgacaagugccccuccaccggcgaggcccaccucgccgaggagaacgagggcgacaacgccugcaagcgcaccuacuccgaccgcggcuggggcaacggcugcggccucuucggcaagggcuccaucgucgccugcgccaaguucaccugcgccaaguccaugucccucuucgaggucgaccagaccaagauccaguacgucauccgcgcccagcuccacgucggcgccaagcaggagaacuggaacaccgacaucaagacccucaaguucgacgcccucuccggcucccaggaggucgaguucaucggcuacggcaaggccacccucgagugccagguccagaccgccgucgacuucggcaacuccuacaucgccgagauggagaccgaguccuggaucgucgaccgccagugggcccaggaccucacccuccccuggcaguccggcuccggcggcgucuggcgcgagaugcaccaccucgucgaguucgagcccccccacgccgccaccauccgcguccucgcccucggcaaccaggagggcucccucaagaccgcccucaccggcgccaugcgcgucaccaaggacaccaacgacaacaaccucuacaagcuccacggcggccacgucuccugccgcgucaagcucuccgcccucacccucaagggcaccuccuacaagaucugcaccgacaagauguucuucgucaagaaccccaccgacaccggccacggcaccgucgucaugcaggucaaggucuccaagggcgcccccugccgcauccccgucaucgucgccgacgaccucaccgccgccaucaacaagggcauccucgucaccgucaaccccaucgccuccaccaacgacgacgagguccucaucgaggucaacccccccuucggcgacuccuacaucaucgucggccgcggcgacucccgccucaccuaccaguggcacaaggagggcuccuccaucggcuccacccucggcaaggccuucuccaccacccucaagggcgcccagcgccucgccgcccucggcgacaccgccugggacuucggcuccaucggcggcgucuucaacuccaucggccgcgccguccaccaggucuucggcggcgccuuccgcacccucuucggcggcauguccuggaucacccagggccucaugggcgcccuccuccucuggaugggcgucaacgcccgcgaccgcuccaucgcccucgccuuccucgccaccggcggcguccucgucuuccucgccaccaacguccacgccugaggacuagucccuguucccagagcccacuuuuuuuucuuuuuuugaaauaaaauagccugucuuucagaucuaaaaaaaaaaaaaaaaaaaaaaaaaaaaaaaaaaaaaaaaaaaaaaaaaaaaaaaaaaaaaaaaugcaucccccccccccccccccccccccccccccccaaaggcucuuuucagagccaccagaauu

SEQ ID NO: 1747 - RNA, 2353 nt, Artificial Sequence
  mRNA product Design c-5 comprising derived and/or modified sequence from YFV__NC_002031.1__X-SS-prME (polyprotein: aa92-778) (opt2)
gggagagcggcucggccauuuugucccagucaguccggaggcugcggcugcagaaguaccgccugcggaguaacugcaaagaagcuuaccaugcgcggccucuccucccgcaagcgccgcucccacgacguccucaccguccaguuccucauccucggcaugcuccucaugaccggcggcgucacccucguccgcaagaaccgcuggcuccuccucaacgucaccuccgaggaccucggcaagaccuucuccgucggcaccggcaacugcaccaccaacauccucgaggccaaguacuggugccccgacuccauggaguacaacugccccaaccucuccccccgcgaggagcccgacgacaucgacugcuggugcuacggcgucgagaacguccgcgucgccuacggcaagugcgacuccgccggccgcucccgccgcucccgccgcgccaucgaccuccccacccacgagaaccacggccucaagacccgccaggagaaguggaugaccggccgcaugggcgagcgccagcuccagaagaucgagcgcugguucguccgcaaccccuucuucgccgucaccgcccucaccaucgccuaccucgucggcuccaacaugacccagcgcgucgucaucgcccuccucguccucgccgucggccccgccuacuccgcccacugcaucggcaucaccgaccgcgacuucaucgagggcguccacggcggcaccugggucuccgccacccucgagcaggacaagugcgucaccgucauggcccccgacaagcccucccucgacaucucccucgagaccgucgccaucgaccgccccgccgagguccgcaaggucugcuacaacgccguccucacccacgucaagaucaacgacaagugccccuccaccggcgaggcccaccucgccgaggagaacgagggcgacaacgccugcaagcgcaccuacuccgaccgcggcuggggcaacggcugcggccucuucggcaagggcuccaucgucgccugcgccaaguucaccugcgccaaguccaugucccucuucgaggucgaccagaccaagauccaguacgucauccgcgcccagcuccacgucggcgccaagcaggagaacuggaacaccgacaucaagacccucaaguucgacgcccucuccggcucccaggaggucgaguucaucggcuacggcaaggccacccucgagugccagguccagaccgccgucgacuucggcaacuccuacaucgccgagauggagaccgaguccuggaucgucgaccgccagugggcccaggaccucacccuccccuggcaguccggcuccggcggcgucuggcgcgagaugcaccaccucgucgaguucgagcccccccacgccgccaccauccgcguccucgcccucggcaaccaggagggcucccucaagaccgcccucaccggcgccaugcgcgucaccaaggacaccaacgacaacaaccucuacaagcuccacggcggccacgucuccugccgcgucaagcucuccgcccucacccucaagggcaccuccuacaagaucugcaccgacaagauguucuucgucaagaaccccaccgacaccggccacggcaccgucgucaugcaggucaaggucuccaagggcgcccccugccgcauccccgucaucgucgccgacgaccucaccgccgccaucaacaagggcauccucgucaccgucaaccccaucgccuccaccaacgacgacgagguccucaucgaggucaacccccccuucggcgacuccuacaucaucgucggccgcggcgacucccgccucaccuaccaguggcacaaggagggcuccuccaucggcaagcucuucacccagaccaugaagggcgucgagcgccucgccgucaugggcgacaccgccugggacuucuccuccgccggcggcuucuucaccuccgucggcaagggcauccacaccgucuucggcuccgccuuccagggccucuucggcggccucaacuggaucaccaaggucaucaugggcgccguccucaucugggucggcaucaacacccgcaacaugaccauguccauguccaugauccucgucggcgucaucaugauguuccucucccucggcgucggcgccugaggacuagucccuguucccagagcccacuuuuuuuucuuuuuuugaaauaaaauagccugucuuucagaucuaaaaaaaaaaaaaaaaaaaaaaaaaaaaaaaaaaaaaaaaaaaaaaaaaaaaaaaaaaaaaaaaugcaucccccccccccccccccccccccccccccccaaaggcucuuuucagagccaccagaauu

SEQ ID NO: 1748 - RNA, 2356 nt, Artificial Sequence
  mRNA product Design c-5 comprising derived and/or modified sequence from YFV__NC_002031.1__SSjev(V3)-prME-XX (polyprotein: aa122-788) (opt2)
gggagagcggcucggccauuuugucccagucaguccggaggcugcggcugcagaaguaccgccugcggaguaacugcaaagaagcuuaccaugaacgagggcuccaucauguggcucgccucccucgccgucgucaucgccugcgccggcgccgucacccucguccgcaagaaccgcuggcuccuccucaacgucaccuccgaggaccucggcaagaccuucuccgucggcaccggcaacugcaccaccaacauccucgaggccaaguacuggugccccgacuccauggaguacaacugccccaaccucuccccccgcgaggagcccgacgacaucgacugcuggugcuacggcgucgagaacguccgcgucgccuacggcaagugcgacuccgccggccgcucccgccgcucccgccgcgccaucgaccuccccacccacgagaaccacggccucaagacccgccaggagaaguggaugaccggccgcaugggcgagcgccagcuccagaagaucgagcgcugguucguccgcaaccccuucuucgccgucaccgcccucaccaucgccuaccucgucggcuccaacaugacccagcgcgucgucaucgcccuccucguccucgccgucggccccgccuacuccgcccacugcaucggcaucaccgaccgcgacuucaucgagggcguccacggcggcaccugggucuccgccacccucgagcaggacaagugcgucaccgucauggcccccgacaagcccucccucgacaucucccucgagaccgucgccaucgaccgccccgccgagguccgcaaggucugcuacaacgccguccucacccacgucaagaucaacgacaagugccccuccaccggcgaggcccaccucgccgaggagaacgagggcgacaacgccugcaagcgcaccuacuccgaccgcggcuggggcaacggcugcggccucuucggcaagggcuccaucgucgccugcgccaaguucaccugcgccaaguccaugucccucuucgaggucgaccagaccaagauccaguacgucauccgcgcccagcuccacgucggcgccaagcaggagaacuggaacaccgacaucaagacccucaaguucgacgcccucuccggcucccaggaggucgaguucaucggcuacggcaaggccacccucgagugccagguccagaccgccgucgacuucggcaacuccuacaucgccgagauggagaccgaguccuggaucgucgaccgccagugggcccaggaccucacccuccccuggcaguccggcuccggcggcgucuggcgcgagaugcaccaccucgucgaguucgagcccccccacgccgccaccauccgcguccucgcccucggcaaccaggagggcucccucaagaccgcccucaccggcgccaugcgcgucaccaaggacaccaacgacaacaaccucuacaagcuccacggcggccacgucuccugccgcgucaagcucuccgcccucacccucaagggcaccuccuacaagaucugcaccgacaagauguucuucgucaagaaccccaccgacaccggccacggcaccgucgucaugcaggucaaggucuccaagggcgcccccugccgcauccccgucaucgucgccgacgaccucaccgccgccaucaacaagggcauccucgucaccgucaaccccaucgccuccaccaacgacgacgagguccucaucgaggucaacccccccuucggcgacuccuacaucaucgucggccgcggcgacucccgccucaccuaccaguggcacaaggagggcuccuccaucggcaagcucuucacccagaccaugaagggcgucgagcgccucgccgucaugggcgacaccgccugggacuucuccuccgccggcggcuucuucaccuccgucggcaagggcauccacaccgucuucggcuccgccuuccagggccucuucggcggccucaacuggaucaccaaggucaucaugggcgccguccucaucugggucggcaucaacacccgcaacaugaccauguccauguccaugauccucgucggcgucaucaugauguuccucucccucggcgucggcgccgaccagggcugcgccaucaacuucggcaagugaggacuagucccuguucccagagcccacuuuuuuuucuuuuuuugaaauaaaauagccugucuuucagaucuaaaaaaaaaaaaaaaaaaaaaaaaaaaaaaaaaaaaaaaaaaaaaaaaaaaaaaaaaaaaaaaaugcaucccccccccccccccccccccccccccccccaaaggcucuuuucagagccaccagaauu

SEQ ID NO: 1749 - RNA, 2365 nt, Artificial Sequence
  mRNA product Design c-5 comprising derived and/or modified sequence from YFV__NC_002031.1__X-SS-prMEdelstem_TM-JEV (polyprotein: aa92-681) (opt3)
gggagagcggcucggccauuuugucccagucaguccggaggcugcggcugcagaaguaccgccugcggaguaacugcaaagaagcuuaccaugagaggccugagcuccaggaagcggcgcucucacgacgugcucaccguccaguuccuuauccuggggauguuguuaaugacaggagguguuacucuggugcguaaaaaccgauggcuacuccugaauguaacgucagaggaucuuggcaagaccuuuaguguggggacaggaaacugcacuaccaauauucuggaagccaaauacuggugucccgacagcauggaguauaacugcccuaauuuguccccaagagaggaaccggaugacauagauuguuggugcuacggcgucgaaaacgugaggguugcuuaugguaagugugacucugcagggcggucgcgcagaucaaggcgggccaucgaucuccccacacaugagaaucacggacugaaaacccgccaagagaaguggaugacuggccgaaugggcgaaagacagcugcagaagauugagaggugguucgugcggaacccuuucuucgcggucacagcucucaccaucgccuacuuaguggggagcaauaugacgcagcguguaguuauugcacugcuuguguuggccgucggaccagcuuauagugcacauugcaucgguauaacugaccgcgauuuuaucgaaggcgugcacgggggaaccuggguguccgccacacuggagcaagacaaaugugucacuguuauggcucccgauaagccuucucuagacauuagccucgagaccguggccaucgauagaccagcggaaguaaggaaagugugcuacaacgcaguccugacacaugugaagauuaaugacaaaugucccuccaccggcgaggcccaccuugcugaagagaacgaaggugacaaugccugcaagcggacguauucagaucgaggguggggaaacggcuguggccuguucgggaagggaaguaucguugcaugcgcuaaauuuacuugcgccaagagcaugucuuuguucgagguggaccagacaaaaauacaguacgucauucgcgcgcagcuccacgugggugccaagcaagagaauuggaacaccgauaucaaaacucugaaguuugacgcauuauccggcucacaggaaguagaguucauuggguacggaaaagcuacacuggaaugucagguucagaccgccguggauuuuggcaacagcuauaucgcugagauggaaacggagaguuggaucgucgacagacaaugggcccaggaucucacccuuccuuggcagucugguuccgggggcguguggagggagaugcaucaccuggucgaauuugagccaccgcaugcagccacaauucggguguuggcucuaggaaaucaagaaggcagccugaagacugcgcucaccggggcaaugcgcguuacaaaggacacuaacgauaauaaccuguacaaacuucacggaggucacgugucgugcagaguaaagcugucugccuugacccucaaaggcacauccuauaagauauguaccgacaaaauguuuuucgucaagaaucccacugauacggggcauggaacagugguuaugcaagugaaggucucaaaaggcgcuccuugcaggaucccagugauuguagccgacgaccugaccgcagccaucaacaaggguauauuagugacuguuaaucccauugcuaguaccaacgaugacgagguccugaucgaagugaauccuccauucggggauagcuacaucauugugggccguggagacucccggcuaacauaucaguggcacaaagagggcucuagcaucggcagcacccuggggaaggccuucuccacaacucucaaaggagcucagagacuugcagcccugggugacacggcgugggauuuuggcucuaucgggggaguguucaacucaauuggcagggcuguccaccaaguuuuugguggggccuuccggaccuuguuuggaggcaugaguuggauaacacagggcuuaaugggggcacugcuacucuggaugggagugaaugcccgcgaccgaagcaucgcucuggcauuccuugccacugguggcguacugguguuuuuggcuaccaacguccaugccugaggacuagucccuguucccagagcccacuuuuuuuucuuuuuuugaaauaaaauagccugucuuucagaucuaaaaaaaaaaaaaaaaaaaaaaaaaaaaaaaaaaaaaaaaaaaaaaaaaaaaaaaaaaaaaaaaugcaucccccccccccccccccccccccccccccccaaaggcucuuuucagagccaccagaauu

SEQ ID NO: 1750 - RNA, 2338 nt, Artificial Sequence
  mRNA product Design c-5 comprising derived and/or modified sequence from YFV__NC_002031.1__SSjev(V3)-prMEdelstem_TM-JEV (polyprotein: aa122-681) (opt3)
gggagagcggcucggccauuuugucccagucaguccggaggcugcggcugcagaaguaccgccugcggaguaacugcaaagaagcuuaccaugaacgagggcagcaucauguggcuggccucccucgcuguggucauugcaugcgccggggcgguuacucuggugcguaaaaaccgauggcuacuccugaauguaacgucagaggaucuuggcaagaccuuuaguguggggacaggaaacugcacuaccaauauucuggaagccaaauacuggugucccgacagcauggaguauaacugcccuaauuuguccccaagagaggaaccggaugacauagauuguuggugcuacggcgucgaaaacgugaggguugcuuaugguaagugugacucugcagggcggucgcgcagaucaaggcgggccaucgaucuccccacacaugagaaucacggacugaaaacccgccaagagaaguggaugacuggccgaaugggcgaaagacagcugcagaagauugagaggugguucgugcggaacccuuucuucgcggucacagcucucaccaucgccuacuuaguggggagcaauaugacgcagcguguaguuauugcacugcuuguguuggccgucggaccagcuuauagugcacauugcaucgguauaacugaccgcgauuuuaucgaaggcgugcacgggggaaccuggguguccgccacacuggagcaagacaaaugugucacuguuauggcucccgauaagccuucucuagacauuagccucgagaccguggccaucgauagaccagcggaaguaaggaaagugugcuacaacgcaguccugacacaugugaagauuaaugacaaaugucccuccaccggcgaggcccaccuugcugaagagaacgaaggugacaaugccugcaagcggacguauucagaucgaggguggggaaacggcuguggccuguucgggaagggaaguaucguugcaugcgcuaaauuuacuugcgccaagagcaugucuuuguucgagguggaccagacaaaaauacaguacgucauucgcgcgcagcuccacgugggugccaagcaagagaauuggaacaccgauaucaaaacucugaaguuugacgcauuauccggcucacaggaaguagaguucauuggguacggaaaagcuacacuggaaugucagguucagaccgccguggauuuuggcaacagcuauaucgcugagauggaaacggagaguuggaucgucgacagacaaugggcccaggaucucacccuuccuuggcagucugguuccgggggcguguggagggagaugcaucaccuggucgaauuugagccaccgcaugcagccacaauucggguguuggcucuaggaaaucaagaaggcagccugaagacugcgcucaccggggcaaugcgcguuacaaaggacacuaacgauaauaaccuguacaaacuucacggaggucacgugucgugcagaguaaagcugucugccuugacccucaaaggcacauccuauaagauauguaccgacaaaauguuuuucgucaagaaucccacugauacggggcauggaacagugguuaugcaagugaaggucucaaaaggcgcuccuugcaggaucccagugauuguagccgacgaccugaccgcagccaucaacaaggguauauuagugacuguuaaucccauugcuaguaccaacgaugacgagguccugaucgaagugaauccuccauucggggauagcuacaucauugugggccguggagacucccggcuaacauaucaguggcacaaagagggcucuagcaucggcagcacccuggggaaggccuucuccacaacucucaaaggagcucagagacuugcagcccugggugacacggcgugggauuuuggcucuaucgggggaguguucaacucaauuggcagggcuguccaccaaguuuuugguggggccuuccggaccuuguuuggaggcaugaguuggauaacacagggcuuaaugggggcacugcuacucuggaugggagugaaugcccgcgaccgaagcaucgcucuggcauuccuugccacugguggcguacugguguuuuuggcuaccaacguccaugccugaggacuagucccuguucccagagcccacuuuuuuuucuuuuuuugaaauaaaauagccugucuuucagaucuaaaaaaaaaaaaaaaaaaaaaaaaaaaaaaaaaaaaaaaaaaaaaaaaaaaaaaaaaaaaaaaaugcaucccccccccccccccccccccccccccccccaaaggcucuuuucagagccaccagaauu

SEQ ID NO: 1751 - RNA, 2353 nt, Artificial Sequence
  mRNA product Design c-5 comprising derived and/or modified sequence from YFV__NC_002031.1__X-SS-prME (polyprotein: aa92-778) (opt3)
gggagagcggcucggccauuuugucccagucaguccggaggcugcggcugcagaaguaccgccugcggaguaacugcaaagaagcuuaccaugagaggccugagcuccaggaagcggcgcucucacgacgugcucaccguccaguuccuuauccuggggauguuguuaaugacaggagguguuacucuggugcguaaaaaccgauggcuacuccugaauguaacgucagaggaucuuggcaagaccuuuaguguggggacaggaaacugcacuaccaauauucuggaagccaaauacuggugucccgacagcauggaguauaacugcccuaauuuguccccaagagaggaaccggaugacauagauuguuggugcuacggcgucgaaaacgugaggguugcuuaugguaagugugacucugcagggcggucgcgcagaucaaggcgggccaucgaucuccccacacaugagaaucacggacugaaaacccgccaagagaaguggaugacuggccgaaugggcgaaagacagcugcagaagauugagaggugguucgugcggaacccuuucuucgcggucacagcucucaccaucgccuacuuaguggggagcaauaugacgcagcguguaguuauugcacugcuuguguuggccgucggaccagcuuauagugcacauugcaucgguauaacugaccgcgauuuuaucgaaggcgugcacgggggaaccuggguguccgccacacuggagcaagacaaaugugucacuguuauggcucccgauaagccuucucuagacauuagccucgagaccguggccaucgauagaccagcggaaguaaggaaagugugcuacaacgcaguccugacacaugugaagauuaaugacaaaugucccuccaccggcgaggcccaccuugcugaagagaacgaaggugacaaugccugcaagcggacguauucagaucgaggguggggaaacggcuguggccuguucgggaagggaaguaucguugcaugcgcuaaauuuacuugcgccaagagcaugucuuuguucgagguggaccagacaaaaauacaguacgucauucgcgcgcagcuccacgugggugccaagcaagagaauuggaacaccgauaucaaaacucugaaguuugacgcauuauccggcucacaggaaguagaguucauuggguacggaaaagcuacacuggaaugucagguucagaccgccguggauuuuggcaacagcuauaucgcugagauggaaacggagaguuggaucgucgacagacaaugggcccaggaucucacccuuccuuggcagucugguuccgggggcguguggagggagaugcaucaccuggucgaauuugagccaccgcaugcagccacaauucggguguuggcucuaggaaaucaagaaggcagccugaagacugcgcucaccggggcaaugcgcguuacaaaggacacuaacgauaauaaccuguacaaacuucacggaggucacgugucgugcagaguaaagcugucugccuugacccucaaaggcacauccuauaagauauguaccgacaaaauguuuuucgucaagaaucccacugauacggggcauggaacagugguuaugcaagugaaggucucaaaaggcgcuccuugcaggaucccagugauuguagccgacgaccugaccgcagccaucaacaaggguauauuagugacuguuaaucccauugcuaguaccaacgaugacgagguccugaucgaagugaauccuccauucggggauagcuacaucauugugggccguggagacucccggcuaacauaucaguggcacaaagagggcucuagcaucgggaagcucuuuacccagacuaugaaaggagucgagcgacuggccguuaugggugauacagcaugggacuucucaagugcgggcggguuuuucacguccgugggaaagggcauucauaccguguuugguagcgcuuuccaggggcuuuuuggcggauugaacuggauaacuaagguaaucaugggcgccguccugauuuggguggggaucaauacaagaaacaugaccaugucuaugucaaugauccucguuggagugauuaugauguuccugagucuuggcgucggugcaugaggacuagucccuguucccagagcccacuuuuuuuucuuuuuuugaaauaaaauagccugucuuucagaucuaaaaaaaaaaaaaaaaaaaaaaaaaaaaaaaaaaaaaaaaaaaaaaaaaaaaaaaaaaaaaaaaugcaucccccccccccccccccccccccccccccccaaaggcucuuuucagagccaccagaauu

SEQ ID NO: 1752 - RNA, 2356 nt, Artificial Sequence
  mRNA product Design c-5 comprising derived and/or modified sequence from YFV__NC_002031.1__SSjev(V3)-prME-XX (polyprotein: aa122-788) (opt3)
gggagagcggcucggccauuuugucccagucaguccggaggcugcggcugcagaaguaccgccugcggaguaacugcaaagaagcuuaccaugaacgagggcagcaucauguggcuggccucccucgcuguggucauugcaugcgccggggcgguuacucuggugcguaaaaaccgauggcuacuccugaauguaacgucagaggaucuuggcaagaccuuuaguguggggacaggaaacugcacuaccaauauucuggaagccaaauacuggugucccgacagcauggaguauaacugcccuaauuuguccccaagagaggaaccggaugacauagauuguuggugcuacggcgucgaaaacgugaggguugcuuaugguaagugugacucugcagggcggucgcgcagaucaaggcgggccaucgaucuccccacacaugagaaucacggacugaaaacccgccaagagaaguggaugacuggccgaaugggcgaaagacagcugcagaagauugagaggugguucgugcggaacccuuucuucgcggucacagcucucaccaucgccuacuuaguggggagcaauaugacgcagcguguaguuauugcacugcuuguguuggccgucggaccagcuuauagugcacauugcaucgguauaacugaccgcgauuuuaucgaaggcgugcacgggggaaccuggguguccgccacacuggagcaagacaaaugugucacuguuauggcucccgauaagccuucucuagacauuagccucgagaccguggccaucgauagaccagcggaaguaaggaaagugugcuacaacgcaguccugacacaugugaagauuaaugacaaaugucccuccaccggcgaggcccaccuugcugaagagaacgaaggugacaaugccugcaagcggacguauucagaucgaggguggggaaacggcuguggccuguucgggaagggaaguaucguugcaugcgcuaaauuuacuugcgccaagagcaugucuuuguucgagguggaccagacaaaaauacaguacgucauucgcgcgcagcuccacgugggugccaagcaagagaauuggaacaccgauaucaaaacucugaaguuugacgcauuauccggcucacaggaaguagaguucauuggguacggaaaagcuacacuggaaugucagguucagaccgccguggauuuuggcaacagcuauaucgcugagauggaaacggagaguuggaucgucgacagacaaugggcccaggaucucacccuuccuuggcagucugguuccgggggcguguggagggagaugcaucaccuggucgaauuugagccaccgcaugcagccacaauucggguguuggcucuaggaaaucaagaaggcagccugaagacugcgcucaccggggcaaugcgcguuacaaaggacacuaacgauaauaaccuguacaaacuucacggaggucacgugucgugcagaguaaagcugucugccuugacccucaaaggcacauccuauaagauauguaccgacaaaauguuuuucgucaagaaucccacugauacggggcauggaacagugguuaugcaagugaaggucucaaaaggcgcuccuugcaggaucccagugauuguagccgacgaccugaccgcagccaucaacaaggguauauuagugacuguuaaucccauugcuaguaccaacgaugacgagguccugaucgaagugaauccuccauucggggauagcuacaucauugugggccguggagacucccggcuaacauaucaguggcacaaagagggcucuagcaucgggaagcucuuuacccagacuaugaaaggagucgagcgacuggccguuaugggugauacagcaugggacuucucaagugcgggcggguuuuucacguccgugggaaagggcauucauaccguguuugguagcgcuuuccaggggcuuuuuggcggauugaacuggauaacuaagguaaucaugggcgccguccugauuuggguggggaucaauacaagaaacaugaccaugucuaugucaaugauccucguuggagugauuaugauguuccugagucuuggcgucggugcagaucaggggugugccauaaauuuuggaaaaugaggacuagucccuguucccagagcccacuuuuuuuucuuuuuuugaaauaaaauagccugucuuucagaucuaaaaaaaaaaaaaaaaaaaaaaaaaaaaaaaaaaaaaaaaaaaaaaaaaaaaaaaaaaaaaaaaugcaucccccccccccccccccccccccccccccccaaaggcucuuuucagagccaccagaauu

SEQ ID NO: 1753 - RNA, 2365 nt, Artificial Sequence
  mRNA product Design c-5 comprising derived and/or modified sequence from YFV__NC_002031.1__X-SS-prMEdelstem_TM-JEV (polyprotein: aa92-681) (opt4)
gggagagcggcucggccauuuugucccagucaguccggaggcugcggcugcagaaguaccgccugcggaguaacugcaaagaagcuuaccaugagaggccugagcagcagaaagagaagaagccacgacgugcugaccgugcaguuccugauccugggcaugcugcugaugaccggcggcgugacccuggugagaaagaacagauggcugcugcugaacgugaccagcgaggaccugggcaagaccuucagcgugggcaccggcaacugcaccaccaacauccuggaggccaaguacuggugccccgacagcauggaguacaacugccccaaccugagccccagagaggagcccgacgacaucgacugcuggugcuacggcguggagaacgugagaguggccuacggcaagugcgacagcgccggcagaagcagaagaagcagaagagccaucgaccugcccacccacgagaaccacggccugaagaccagacaggagaaguggaugaccggcagaaugggcgagagacagcugcagaagaucgagagaugguucgugagaaaccccuucuucgccgugaccgcccugaccaucgccuaccuggugggcagcaacaugacccagagaguggugaucgcccugcuggugcuggccgugggccccgccuacagcgcccacugcaucggcaucaccgacagagacuucaucgagggcgugcacggcggcaccugggugagcgccacccuggagcaggacaagugcgugaccgugauggcccccgacaagcccagccuggacaucagccuggagaccguggccaucgacagacccgccgaggugagaaaggugugcuacaacgccgugcugacccacgugaagaucaacgacaagugccccagcaccggcgaggcccaccuggccgaggagaacgagggcgacaacgccugcaagagaaccuacagcgacagaggcuggggcaacggcugcggccuguucggcaagggcagcaucguggccugcgccaaguucaccugcgccaagagcaugagccuguucgagguggaccagaccaagauccaguacgugaucagagcccagcugcacgugggcgccaagcaggagaacuggaacaccgacaucaagacccugaaguucgacgcccugagcggcagccaggagguggaguucaucggcuacggcaaggccacccuggagugccaggugcagaccgccguggacuucggcaacagcuacaucgccgagauggagaccgagagcuggaucguggacagacagugggcccaggaccugacccugcccuggcagagcggcagcggcggcguguggagagagaugcaccaccugguggaguucgagcccccccacgccgccaccaucagagugcuggcccugggcaaccaggagggcagccugaagaccgcccugaccggcgccaugagagugaccaaggacaccaacgacaacaaccuguacaagcugcacggcggccacgugagcugcagagugaagcugagcgcccugacccugaagggcaccagcuacaagaucugcaccgacaagauguucuucgugaagaaccccaccgacaccggccacggcaccguggugaugcaggugaaggugagcaagggcgcccccugcagaauccccgugaucguggccgacgaccugaccgccgccaucaacaagggcauccuggugaccgugaaccccaucgccagcaccaacgacgacgaggugcugaucgaggugaacccccccuucggcgacagcuacaucaucgugggcagaggcgacagcagacugaccuaccaguggcacaaggagggcagcagcaucggcagcacccugggcaaggccuucagcaccacccugaagggcgcccagagacuggccgcccugggcgacaccgccugggacuucggcagcaucggcggcguguucaacagcaucggcagagccgugcaccagguguucggcggcgccuucagaacccuguucggcggcaugagcuggaucacccagggccugaugggcgcccugcugcuguggaugggcgugaacgccagagacagaagcaucgcccuggccuuccuggccaccggcggcgugcugguguuccuggccaccaacgugcacgccugaggacuagucccuguucccagagcccacuuuuuuuucuuuuuuugaaauaaaauagccugucuuucagaucuaaaaaaaaaaaaaaaaaaaaaaaaaaaaaaaaaaaaaaaaaaaaaaaaaaaaaaaaaaaaaaaaugcaucccccccccccccccccccccccccccccccaaaggcucuuuucagagccaccagaauu

SEQ ID NO: 1754 - RNA, 2338 nt, Artificial Sequence
  mRNA product Design c-5 comprising derived and/or modified sequence from YFV__NC_002031.1__SSjev(V3)-prMEdelstem_TM-JEV (polyprotein: aa122-681) (opt4)
gggagagcggcucggccauuuugucccagucaguccggaggcugcggcugcagaaguaccgccugcggaguaacugcaaagaagcuuaccaugaacgagggcagcaucauguggcuggccagccuggccguggugaucgccugcgccggcgccgugacccuggugagaaagaacagauggcugcugcugaacgugaccagcgaggaccugggcaagaccuucagcgugggcaccggcaacugcaccaccaacauccuggaggccaaguacuggugccccgacagcauggaguacaacugccccaaccugagccccagagaggagcccgacgacaucgacugcuggugcuacggcguggagaacgugagaguggccuacggcaagugcgacagcgccggcagaagcagaagaagcagaagagccaucgaccugcccacccacgagaaccacggccugaagaccagacaggagaaguggaugaccggcagaaugggcgagagacagcugcagaagaucgagagaugguucgugagaaaccccuucuucgccgugaccgcccugaccaucgccuaccuggugggcagcaacaugacccagagaguggugaucgcccugcuggugcuggccgugggccccgccuacagcgcccacugcaucggcaucaccgacagagacuucaucgagggcgugcacggcggcaccugggugagcgccacccuggagcaggacaagugcgugaccgugauggcccccgacaagcccagccuggacaucagccuggagaccguggccaucgacagacccgccgaggugagaaaggugugcuacaacgccgugcugacccacgugaagaucaacgacaagugccccagcaccggcgaggcccaccuggccgaggagaacgagggcgacaacgccugcaagagaaccuacagcgacagaggcuggggcaacggcugcggccuguucggcaagggcagcaucguggccugcgccaaguucaccugcgccaagagcaugagccuguucgagguggaccagaccaagauccaguacgugaucagagcccagcugcacgugggcgccaagcaggagaacuggaacaccgacaucaagacccugaaguucgacgcccugagcggcagccaggagguggaguucaucggcuacggcaaggccacccuggagugccaggugcagaccgccguggacuucggcaacagcuacaucgccgagauggagaccgagagcuggaucguggacagacagugggcccaggaccugacccugcccuggcagagcggcagcggcggcguguggagagagaugcaccaccugguggaguucgagcccccccacgccgccaccaucagagugcuggcccugggcaaccaggagggcagccugaagaccgcccugaccggcgccaugagagugaccaaggacaccaacgacaacaaccuguacaagcugcacggcggccacgugagcugcagagugaagcugagcgcccugacccugaagggcaccagcuacaagaucugcaccgacaagauguucuucgugaagaaccccaccgacaccggccacggcaccguggugaugcaggugaaggugagcaagggcgcccccugcagaauccccgugaucguggccgacgaccugaccgccgccaucaacaagggcauccuggugaccgugaaccccaucgccagcaccaacgacgacgaggugcugaucgaggugaacccccccuucggcgacagcuacaucaucgugggcagaggcgacagcagacugaccuaccaguggcacaaggagggcagcagcaucggcagcacccugggcaaggccuucagcaccacccugaagggcgcccagagacuggccgcccugggcgacaccgccugggacuucggcagcaucggcggcguguucaacagcaucggcagagccgugcaccagguguucggcggcgccuucagaacccuguucggcggcaugagcuggaucacccagggccugaugggcgcccugcugcuguggaugggcgugaacgccagagacagaagcaucgcccuggccuuccuggccaccggcggcgugcugguguuccuggccaccaacgugcacgccugaggacuagucccuguucccagagcccacuuuuuuuucuuuuuuugaaauaaaauagccugucuuucagaucuaaaaaaaaaaaaaaaaaaaaaaaaaaaaaaaaaaaaaaaaaaaaaaaaaaaaaaaaaaaaaaaaugcaucccccccccccccccccccccccccccccccaaaggcucuuuucagagccaccagaauu

SEQ ID NO: 1755 - RNA, 2353 nt, Artificial Sequence
  mRNA product Design c-5 comprising derived and/or modified sequence from YFV__NC_002031.1__X-SS-prME (polyprotein: aa92-778) (opt4)
gggagagcggcucggccauuuugucccagucaguccggaggcugcggcugcagaaguaccgccugcggaguaacugcaaagaagcuuaccaugagaggccugagcagcagaaagagaagaagccacgacgugcugaccgugcaguuccugauccugggcaugcugcugaugaccggcggcgugacccuggugagaaagaacagauggcugcugcugaacgugaccagcgaggaccugggcaagaccuucagcgugggcaccggcaacugcaccaccaacauccuggaggccaaguacuggugccccgacagcauggaguacaacugccccaaccugagccccagagaggagcccgacgacaucgacugcuggugcuacggcguggagaacgugagaguggccuacggcaagugcgacagcgccggcagaagcagaagaagcagaagagccaucgaccugcccacccacgagaaccacggccugaagaccagacaggagaaguggaugaccggcagaaugggcgagagacagcugcagaagaucgagagaugguucgugagaaaccccuucuucgccgugaccgcccugaccaucgccuaccuggugggcagcaacaugacccagagaguggugaucgcccugcuggugcuggccgugggccccgccuacagcgcccacugcaucggcaucaccgacagagacuucaucgagggcgugcacggcggcaccugggugagcgccacccuggagcaggacaagugcgugaccgugauggcccccgacaagcccagccuggacaucagccuggagaccguggccaucgacagacccgccgaggugagaaaggugugcuacaacgccgugcugacccacgugaagaucaacgacaagugccccagcaccggcgaggcccaccuggccgaggagaacgagggcgacaacgccugcaagagaaccuacagcgacagaggcuggggcaacggcugcggccuguucggcaagggcagcaucguggccugcgccaaguucaccugcgccaagagcaugagccuguucgagguggaccagaccaagauccaguacgugaucagagcccagcugcacgugggcgccaagcaggagaacuggaacaccgacaucaagacccugaaguucgacgcccugagcggcagccaggagguggaguucaucggcuacggcaaggccacccuggagugccaggugcagaccgccguggacuucggcaacagcuacaucgccgagauggagaccgagagcuggaucguggacagacagugggcccaggaccugacccugcccuggcagagcggcagcggcggcguguggagagagaugcaccaccugguggaguucgagcccccccacgccgccaccaucagagugcuggcccugggcaaccaggagggcagccugaagaccgcccugaccggcgccaugagagugaccaaggacaccaacgacaacaaccuguacaagcugcacggcggccacgugagcugcagagugaagcugagcgcccugacccugaagggcaccagcuacaagaucugcaccgacaagauguucuucgugaagaaccccaccgacaccggccacggcaccguggugaugcaggugaaggugagcaagggcgcccccugcagaauccccgugaucguggccgacgaccugaccgccgccaucaacaagggcauccuggugaccgugaaccccaucgccagcaccaacgacgacgaggugcugaucgaggugaacccccccuucggcgacagcuacaucaucgugggcagaggcgacagcagacugaccuaccaguggcacaaggagggcagcagcaucggcaagcuguucacccagaccaugaagggcguggagagacuggccgugaugggcgacaccgccugggacuucagcagcgccggcggcuucuucaccagcgugggcaagggcauccacaccguguucggcagcgccuuccagggccuguucggcggccugaacuggaucaccaaggugaucaugggcgccgugcugaucugggugggcaucaacaccagaaacaugaccaugagcaugagcaugauccuggugggcgugaucaugauguuccugagccugggcgugggcgccugaggacuagucccuguucccagagcccacuuuuuuuucuuuuuuugaaauaaaauagccugucuuucagaucuaaaaaaaaaaaaaaaaaaaaaaaaaaaaaaaaaaaaaaaaaaaaaaaaaaaaaaaaaaaaaaaaugcaucccccccccccccccccccccccccccccccaaaggcucuuuucagagccaccagaauu

SEQ ID NO: 1756 - RNA, 2356 nt, Artificial Sequence
  mRNA product Design c-5 comprising derived and/or modified sequence from YFV__NC_002031.1__SSjev(V3)-prME-XX (polyprotein: aa122-788) (opt4)
gggagagcggcucggccauuuugucccagucaguccggaggcugcggcugcagaaguaccgccugcggaguaacugcaaagaagcuuaccaugaacgagggcagcaucauguggcuggccagccuggccguggugaucgccugcgccggcgccgugacccuggugagaaagaacagauggcugcugcugaacgugaccagcgaggaccugggcaagaccuucagcgugggcaccggcaacugcaccaccaacauccuggaggccaaguacuggugccccgacagcauggaguacaacugccccaaccugagccccagagaggagcccgacgacaucgacugcuggugcuacggcguggagaacgugagaguggccuacggcaagugcgacagcgccggcagaagcagaagaagcagaagagccaucgaccugcccacccacgagaaccacggccugaagaccagacaggagaaguggaugaccggcagaaugggcgagagacagcugcagaagaucgagagaugguucgugagaaaccccuucuucgccgugaccgcccugaccaucgccuaccuggugggcagcaacaugacccagagaguggugaucgcccugcuggugcuggccgugggccccgccuacagcgcccacugcaucggcaucaccgacagagacuucaucgagggcgugcacggcggcaccugggugagcgccacccuggagcaggacaagugcgugaccgugauggcccccgacaagcccagccuggacaucagccuggagaccguggccaucgacagacccgccgaggugagaaaggugugcuacaacgccgugcugacccacgugaagaucaacgacaagugccccagcaccggcgaggcccaccuggccgaggagaacgagggcgacaacgccugcaagagaaccuacagcgacagaggcuggggcaacggcugcggccuguucggcaagggcagcaucguggccugcgccaaguucaccugcgccaagagcaugagccuguucgagguggaccagaccaagauccaguacgugaucagagcccagcugcacgugggcgccaagcaggagaacuggaacaccgacaucaagacccugaaguucgacgcccugagcggcagccaggagguggaguucaucggcuacggcaaggccacccuggagugccaggugcagaccgccguggacuucggcaacagcuacaucgccgagauggagaccgagagcuggaucguggacagacagugggcccaggaccugacccugcccuggcagagcggcagcggcggcguguggagagagaugcaccaccugguggaguucgagcccccccacgccgccaccaucagagugcuggcccugggcaaccaggagggcagccugaagaccgcccugaccggcgccaugagagugaccaaggacaccaacgacaacaaccuguacaagcugcacggcggccacgugagcugcagagugaagcugagcgcccugacccugaagggcaccagcuacaagaucugcaccgacaagauguucuucgugaagaaccccaccgacaccggccacggcaccguggugaugcaggugaaggugagcaagggcgcccccugcagaauccccgugaucguggccgacgaccugaccgccgccaucaacaagggcauccuggugaccgugaaccccaucgccagcaccaacgacgacgaggugcugaucgaggugaacccccccuucggcgacagcuacaucaucgugggcagaggcgacagcagacugaccuaccaguggcacaaggagggcagcagcaucggcaagcuguucacccagaccaugaagggcguggagagacuggccgugaugggcgacaccgccugggacuucagcagcgccggcggcuucuucaccagcgugggcaagggcauccacaccguguucggcagcgccuuccagggccuguucggcggccugaacuggaucaccaaggugaucaugggcgccgugcugaucugggugggcaucaacaccagaaacaugaccaugagcaugagcaugauccuggugggcgugaucaugauguuccugagccugggcgugggcgccgaccagggcugcgccaucaacuucggcaagugaggacuagucccuguucccagagcccacuuuuuuuucuuuuuuugaaauaaaauagccugucuuucagaucuaaaaaaaaaaaaaaaaaaaaaaaaaaaaaaaaaaaaaaaaaaaaaaaaaaaaaaaaaaaaaaaaugcaucccccccccccccccccccccccccccccccaaaggcucuuuucagagccaccagaauu

SEQ ID NO: 1757 - RNA, 2365 nt, Artificial Sequence
  mRNA product Design c-5 comprising derived and/or modified sequence from YFV__NC_002031.1__X-SS-prMEdelstem_TM-JEV (polyprotein: aa92-681) (opt5)
gggagagcggcucggccauuuugucccagucaguccggaggcugcggcugcagaaguaccgccugcggaguaacugcaaagaagcuuaccaugagaggccugagcucccggaagcgcagaucucacgacgugcucaccguccaguuccugauccuugggaugcugcucaugacaggaggcguuacgcuggugcggaaaaaccgcuggcuucugcucaaugugaccagcgaggaucuggggaagacauuuuccgucggaaccggcaacugcacaaccaauauucuggaagccaaauacuggugucccgacucuauggaguauaacugcccuaaucucagcccgagagaagaacccgaugacaucgauuguuggugcuacgggguggaaaacguucggguggcuuauggaaagugugacuccgccggccgcucuagacggagccgcagagcgauugaucugccuacacaugagaaucacggccuuaaaacccggcaagagaaguggaugacggggcgcaugggagaaagacagcugcagaagaucgagcggugguucguccgcaaccccuuuuucgcugugaccgcccucacaauugccuaccugguuggcuccaauaugacccagagaguggucaucgcccuucuggugcucgcuguggggccugcuuauagcgcccauugcaucggaauuacagaccgggauuuuaucgaaggcguccacgggggaaccuggguuucugcgacgcuggagcaagacaaaugugugacagugauggcccccgauaagccuucccuggacauuagccucgagaccgucgcuaucgauagaccggccgaagugcgcaaaguuugcuacaacgcugugcugacacaugucaagauuaaugacaaaugucccucuaccggcgaggcccaccuugcggaagagaacgaaggcgacaaugccugcaagcggaccuauuccgauagaggguggggaaacggcugugggcuguucggaaagggcagcaucguggcuugcgccaaauuuacaugcgcuaagucuaugucccucuucgagguugaccagacgaaaauucaguacgugauccgcgcccagcugcacgucggggccaagcaagagaauuggaacaccgauaucaaaacacuuaaguuugacgcucugagcggaucccaggaaguggaguucauuggcuacggcaaagcgacccucgaaugucagguccagacagccguggauuuugggaacucuuauaucgcugagauggaaaccgagagcuggauuguugaccggcaaugggcccaggaucugacgcugccuuggcaguccggaagcggcgggguguggagagagaugcaucaccucgucgaguucgagcccccucaugccgcuacaauccgcgugcuggcccuuggaaaucaagaaggcucucugaagaccgcgcucaccggggcuaugcggguuacaaaggacaccaacgauaauaaccuguacaaacuucacggcggacacguguccugcagagucaagcugagcgcccucacacugaaaggcacgucuuauaagauuuguaccgacaaaauguuuuucgugaagaaucccacagauaccgggcauggaacagugguuaugcaggucaaggugagcaaaggcgccccgugccgcaucccugugaucgucgcugacgaccugaccgccgcuauuaacaaggggauccucgugacgguuaaucccauugccuccaccaacgaugacgaggugcugaucgaagucaauccucccuucggagauucuuacauuaucgugggccggggagacagcagacuuacauaucaguggcacaaagagggcuccagcaucggcagcacccuggggaaggccuucuccacaacgcucaaaggagcucagagacuggccgcgcuuggcgacaccgcuugggauuuugggucuaucggaggcguguucaacagcauugggcgggccguccaccaaguuuuuggaggcgccuuccgcacacuguuuggcgggauguccuggaucacccagggacucaugggcgcucugcuucuguggaugggggugaaugccagagaccggucuauugcucucgccuuccuggcgacaggaggcgugcuggucuuucucgccaccaacgugcaugcuugaggacuagucccuguucccagagcccacuuuuuuuucuuuuuuugaaauaaaauagccugucuuucagaucuaaaaaaaaaaaaaaaaaaaaaaaaaaaaaaaaaaaaaaaaaaaaaaaaaaaaaaaaaaaaaaaaugcaucccccccccccccccccccccccccccccccaaaggcucuuuucagagccaccagaauu

SEQ ID NO: 1758 - RNA, 2338 nt, Artificial Sequence
  mRNA product Design c-5 comprising derived and/or modified sequence from YFV__NC_002031.1__SSjev(V3)-prMEdelstem_TM-JEV (polyprotein: aa122-681) (opt5)
gggagagcggcucggccauuuugucccagucaguccggaggcugcggcugcagaaguaccgccugcggaguaacugcaaagaagcuuaccaugaacgagggcagcaucauguggcuggccucccucgcuguggucauugccugcgcgggggcuguuacgcuggugcggaaaaaccgcuggcuucugcucaaugugaccagcgaggaucuggggaagacauuuuccgucggaaccggcaacugcacaaccaauauucuggaagccaaauacuggugucccgacucuauggaguauaacugcccuaaucucagcccgagagaagaacccgaugacaucgauuguuggugcuacgggguggaaaacguucggguggcuuauggaaagugugacuccgccggccgcucuagacggagccgcagagcgauugaucugccuacacaugagaaucacggccuuaaaacccggcaagagaaguggaugacggggcgcaugggagaaagacagcugcagaagaucgagcggugguucguccgcaaccccuuuuucgcugugaccgcccucacaauugccuaccugguuggcuccaauaugacccagagaguggucaucgcccuucuggugcucgcuguggggccugcuuauagcgcccauugcaucggaauuacagaccgggauuuuaucgaaggcguccacgggggaaccuggguuucugcgacgcuggagcaagacaaaugugugacagugauggcccccgauaagccuucccuggacauuagccucgagaccgucgcuaucgauagaccggccgaagugcgcaaaguuugcuacaacgcugugcugacacaugucaagauuaaugacaaaugucccucuaccggcgaggcccaccuugcggaagagaacgaaggcgacaaugccugcaagcggaccuauuccgauagaggguggggaaacggcugugggcuguucggaaagggcagcaucguggcuugcgccaaauuuacaugcgcuaagucuaugucccucuucgagguugaccagacgaaaauucaguacgugauccgcgcccagcugcacgucggggccaagcaagagaauuggaacaccgauaucaaaacacuuaaguuugacgcucugagcggaucccaggaaguggaguucauuggcuacggcaaagcgacccucgaaugucagguccagacagccguggauuuugggaacucuuauaucgcugagauggaaaccgagagcuggauuguugaccggcaaugggcccaggaucugacgcugccuuggcaguccggaagcggcgggguguggagagagaugcaucaccucgucgaguucgagcccccucaugccgcuacaauccgcgugcuggcccuuggaaaucaagaaggcucucugaagaccgcgcucaccggggcuaugcggguuacaaaggacaccaacgauaauaaccuguacaaacuucacggcggacacguguccugcagagucaagcugagcgcccucacacugaaaggcacgucuuauaagauuuguaccgacaaaauguuuuucgugaagaaucccacagauaccgggcauggaacagugguuaugcaggucaaggugagcaaaggcgccccgugccgcaucccugugaucgucgcugacgaccugaccgccgcuauuaacaaggggauccucgugacgguuaaucccauugccuccaccaacgaugacgaggugcugaucgaagucaauccucccuucggagauucuuacauuaucgugggccggggagacagcagacuuacauaucaguggcacaaagagggcuccagcaucggcagcacccuggggaaggccuucuccacaacgcucaaaggagcucagagacuggccgcgcuuggcgacaccgcuugggauuuugggucuaucggaggcguguucaacagcauugggcgggccguccaccaaguuuuuggaggcgccuuccgcacacuguuuggcgggauguccuggaucacccagggacucaugggcgcucugcuucuguggaugggggugaaugccagagaccggucuauugcucucgccuuccuggcgacaggaggcgugcuggucuuucucgccaccaacgugcaugcuugaggacuagucccuguucccagagcccacuuuuuuuucuuuuuuugaaauaaaauagccugucuuucagaucuaaaaaaaaaaaaaaaaaaaaaaaaaaaaaaaaaaaaaaaaaaaaaaaaaaaaaaaaaaaaaaaaugcaucccccccccccccccccccccccccccccccaaaggcucuuuucagagccaccagaauu

SEQ ID NO: 1759 - RNA, 2353 nt, Artificial Sequence
  mRNA product Design c-5 comprising derived and/or modified sequence from YFV__NC_002031.1__X-SS-prME (polyprotein: aa92-778) (opt5)
gggagagcggcucggccauuuugucccagucaguccggaggcugcggcugcagaaguaccgccugcggaguaacugcaaagaagcuuaccaugagaggccugagcucccggaagcgcagaucucacgacgugcucaccguccaguuccugauccuugggaugcugcucaugacaggaggcguuacgcuggugcggaaaaaccgcuggcuucugcucaaugugaccagcgaggaucuggggaagacauuuuccgucggaaccggcaacugcacaaccaauauucuggaagccaaauacuggugucccgacucuauggaguauaacugcccuaaucucagcccgagagaagaacccgaugacaucgauuguuggugcuacgggguggaaaacguucggguggcuuauggaaagugugacuccgccggccgcucuagacggagccgcagagcgauugaucugccuacacaugagaaucacggccuuaaaacccggcaagagaaguggaugacggggcgcaugggagaaagacagcugcagaagaucgagcggugguucguccgcaaccccuuuuucgcugugaccgcccucacaauugccuaccugguuggcuccaauaugacccagagaguggucaucgcccuucuggugcucgcuguggggccugcuuauagcgcccauugcaucggaauuacagaccgggauuuuaucgaaggcguccacgggggaaccuggguuucugcgacgcuggagcaagacaaaugugugacagugauggcccccgauaagccuucccuggacauuagccucgagaccgucgcuaucgauagaccggccgaagugcgcaaaguuugcuacaacgcugugcugacacaugucaagauuaaugacaaaugucccucuaccggcgaggcccaccuugcggaagagaacgaaggcgacaaugccugcaagcggaccuauuccgauagaggguggggaaacggcugugggcuguucggaaagggcagcaucguggcuugcgccaaauuuacaugcgcuaagucuaugucccucuucgagguugaccagacgaaaauucaguacgugauccgcgcccagcugcacgucggggccaagcaagagaauuggaacaccgauaucaaaacacuuaaguuugacgcucugagcggaucccaggaaguggaguucauuggcuacggcaaagcgacccucgaaugucagguccagacagccguggauuuugggaacucuuauaucgcugagauggaaaccgagagcuggauuguugaccggcaaugggcccaggaucugacgcugccuuggcaguccggaagcggcgggguguggagagagaugcaucaccucgucgaguucgagcccccucaugccgcuacaauccgcgugcuggcccuuggaaaucaagaaggcucucugaagaccgcgcucaccggggcuaugcggguuacaaaggacaccaacgauaauaaccuguacaaacuucacggcggacacguguccugcagagucaagcugagcgcccucacacugaaaggcacgucuuauaagauuuguaccgacaaaauguuuuucgugaagaaucccacagauaccgggcauggaacagugguuaugcaggucaaggugagcaaaggcgccccgugccgcaucccugugaucgucgcugacgaccugaccgccgcuauuaacaaggggauccucgugacgguuaaucccauugccuccaccaacgaugacgaggugcugaucgaagucaauccucccuucggagauucuuacauuaucgugggccggggagacagcagacuuacauaucaguggcacaaagagggcuccagcaucggaaagcuguuuacccagacaaugaaaggcguugagcgccucgcggugaugggggauaccgccugggacuucucuuccgcuggaggcuuuuucacgagcgucgggaaggggauucauacaguguuuggcucugccuuccaagggcuguuuggcggacugaacuggaucaccaagguuauuaugggcgcugugcuuaucugggucgggauuaauacacggaacaugaccauguccaugagcaugauccucgugggagugauuaugauguuccugucccugggcgucggggccugaggacuagucccuguucccagagcccacuuuuuuuucuuuuuuugaaauaaaauagccugucuuucagaucuaaaaaaaaaaaaaaaaaaaaaaaaaaaaaaaaaaaaaaaaaaaaaaaaaaaaaaaaaaaaaaaaugcaucccccccccccccccccccccccccccccccaaaggcucuuuucagagccaccagaauu

SEQ ID NO: 1760 - RNA, 2356 nt, Artificial Sequence
  mRNA product Design c-5 comprising derived and/or modified sequence from YFV__NC_002031.1__SSjev(V3)-prME-XX (polyprotein: aa122-788) (opt5)
gggagagcggcucggccauuuugucccagucaguccggaggcugcggcugcagaaguaccgccugcggaguaacugcaaagaagcuuaccaugaacgagggcagcaucauguggcuggccucccucgcuguggucauugccugcgcgggggcuguuacgcuggugcggaaaaaccgcuggcuucugcucaaugugaccagcgaggaucuggggaagacauuuuccgucggaaccggcaacugcacaaccaauauucuggaagccaaauacuggugucccgacucuauggaguauaacugcccuaaucucagcccgagagaagaacccgaugacaucgauuguuggugcuacgggguggaaaacguucggguggcuuauggaaagugugacuccgccggccgcucuagacggagccgcagagcgauugaucugccuacacaugagaaucacggccuuaaaacccggcaagagaaguggaugacggggcgcaugggagaaagacagcugcagaagaucgagcggugguucguccgcaaccccuuuuucgcugugaccgcccucacaauugccuaccugguuggcuccaauaugacccagagaguggucaucgcccuucuggugcucgcuguggggccugcuuauagcgcccauugcaucggaauuacagaccgggauuuuaucgaaggcguccacgggggaaccuggguuucugcgacgcuggagcaagacaaaugugugacagugauggcccccgauaagccuucccuggacauuagccucgagaccgucgcuaucgauagaccggccgaagugcgcaaaguuugcuacaacgcugugcugacacaugucaagauuaaugacaaaugucccucuaccggcgaggcccaccuugcggaagagaacgaaggcgacaaugccugcaagcggaccuauuccgauagaggguggggaaacggcugugggcuguucggaaagggcagcaucguggcuugcgccaaauuuacaugcgcuaagucuaugucccucuucgagguugaccagacgaaaauucaguacgugauccgcgcccagcugcacgucggggccaagcaagagaauuggaacaccgauaucaaaacacuuaaguuugacgcucugagcggaucccaggaaguggaguucauuggcuacggcaaagcgacccucgaaugucagguccagacagccguggauuuugggaacucuuauaucgcugagauggaaaccgagagcuggauuguugaccggcaaugggcccaggaucugacgcugccuuggcaguccggaagcggcgggguguggagagagaugcaucaccucgucgaguucgagcccccucaugccgcuacaauccgcgugcuggcccuuggaaaucaagaaggcucucugaagaccgcgcucaccggggcuaugcggguuacaaaggacaccaacgauaauaaccuguacaaacuucacggcggacacguguccugcagagucaagcugagcgcccucacacugaaaggcacgucuuauaagauuuguaccgacaaaauguuuuucgugaagaaucccacagauaccgggcauggaacagugguuaugcaggucaaggugagcaaaggcgccccgugccgcaucccugugaucgucgcugacgaccugaccgccgcuauuaacaaggggauccucgugacgguuaaucccauugccuccaccaacgaugacgaggugcugaucgaagucaauccucccuucggagauucuuacauuaucgugggccggggagacagcagacuuacauaucaguggcacaaagagggcuccagcaucggaaagcuguuuacccagacaaugaaaggcguugagcgccucgcggugaugggggauaccgccugggacuucucuuccgcuggaggcuuuuucacgagcgucgggaaggggauucauacaguguuuggcucugccuuccaagggcuguuuggcggacugaacuggaucaccaagguuauuaugggcgcugugcuuaucugggucgggauuaauacacggaacaugaccauguccaugagcaugauccucgugggagugauuaugauguuccugucccugggcgucggggccgaucagggaugugcgaucaauuuuggcaaaugaggacuagucccuguucccagagcccacuuuuuuuucuuuuuuugaaauaaaauagccugucuuucagaucuaaaaaaaaaaaaaaaaaaaaaaaaaaaaaaaaaaaaaaaaaaaaaaaaaaaaaaaaaaaaaaaaugcaucccccccccccccccccccccccccccccccaaaggcucuuuucagagccaccagaauu

SEQ ID NO: 1761 - RNA, 2365 nt, Artificial Sequence
  mRNA product Design c-5 comprising derived and/or modified sequence from YFV__NC_002031.1__X-SS-prMEdelstem_TM-JEV (polyprotein: aa92-681) (opt6)
gggagagcggcucggccauuuugucccagucaguccggaggcugcggcugcagaaguaccgccugcggaguaacugcaaagaagcuuaccaugagaggauuaucaaguagaaaaagaagaucacaugauguacuaaccgugcaauuuuugaucuuagggaugcucuuaaugacaggagguguuacauuaguaagaaagaaucgauggcugcuuuuaaaugugacaucagaggauuuagggaaaacauuuucgguaggaacaggaaauuguacuacaaauauacuugaagcaaaauauuggugcccagacucuauggaauauaauuguccaaauuuaaguccuagagaagaaccugacgauauagauuguugguguuaugguguagaaaauguaagaguagcauacggcaaaugcgauagugcaggacguucuagacguucaaggagagccauagaucugcccacucacgaaaaucacggauugaaaacacgacaagaaaaauggaugacugggcgaaugggagaaagacaacuacagaaaauugaaagaugguucguuagaaauccauucuuugccguaacagcuuuaacaauagccuauuuaguagguaguaauaugacacaaagaguaguaauagcauugcuaguguuagcaguuggaccagcuuauagugcacauugcauaggaauaacagauagagacuuuauagaaggaguacacgggggaacuuggguaagugccacuuuagaacaagauaaauguguuacagugauggcgccagauaaaccaagucuggacauaaguuuggaaacaguagcgauugauagacccgcagaaguaagaaaaguuuguuauaaugcuguucuaacccauguuaaaauaaaugauaaaugcccuagcaccggagaagcccaucuagcagaagaaaaugaaggagauaacgcauguaaacgaacauacucagauagaggauggggcaacggauguggcuuguuuggaaaagguagcauaguagcaugcgcuaaauuuacaugcgcaaagucaaugucauuauuugaaguagaucaaacaaaaauacaauauguaauaagagcucaauuacacgugggugcaaaacaagaaaauuggaauacagacauaaagacacuaaaguucgacgcauuaaguggaucacaagagguagaauuuauaggguacggaaaagcgacuuuagagugucaaguccaaacagcaguagauuucgguaacucauacauagcagaaauggaaacugaaaguuggauaguagauagacaaugggcacaagacuugacacuaccuuggcaaucaggaagcggaggaguauggagagaaaugcaucauuuaguagaauuugaaccaccucaugcagcaacaauaagaguauuagcccuaggaaaccaagaaggaaguuuaaaaacagcacuaacaggagcuaugagaguaacaaaagauacaaaugacaacaaucuauacaaauuacacggaggacauguaagcugccggguaaaguugagcgcacuaacauuaaaaggaacgaguuauaaaauaugcacagauaaaauguucuuuguuaaaaauccuacagauaccggucauggaacaguaguaaugcaaguaaaaguaaguaaaggcgcucccuguagaauaccuguaauagucgcagacgauuuaaccgcagcaauaaauaaaggaauauuagucacgguaaacccaauagcgucaacaaaugaugaugaaguauuaauagaaguuaacccaccuuuuggagacaguuauauaauagucggaaggggugauaguagacuaacauaccaauggcauaaagaaggaagcucaauaggaaguacacuaggaaaagcauuuaguacaacauuaaaaggagcacaaagauuagcagcauuaggagauacagcaugggauuuuggaagcauaggaggaguauuuaauaguauagguagagcaguacaucaaguauuuggaggagcauuuagaacauuauuuggaggaaugaguuggauaacacaaggauuaaugggagcauuauuauuauggaugggaguaaaugcaagagauagaaguauagcauuagcauuuuuagcaacaggaggaguauuaguauuuuuagcaacaaauguacaugcaugaggacuagucccuguucccagagcccacuuuuuuuucuuuuuuugaaauaaaauagccugucuuucagaucuaaaaaaaaaaaaaaaaaaaaaaaaaaaaaaaaaaaaaaaaaaaaaaaaaaaaaaaaaaaaaaaaugcaucccccccccccccccccccccccccccccccaaaggcucuuuucagagccaccagaauu

SEQ ID NO: 1762 - RNA, 2338 nt, Artificial Sequence
  mRNA product Design c-5 comprising derived and/or modified sequence from YFV__NC_002031.1__SSjev(V3)-prMEdelstem_TM-JEV (polyprotein: aa122-681) (opt6)
gggagagcggcucggccauuuugucccagucaguccggaggcugcggcugcagaaguaccgccugcggaguaacugcaaagaagcuuaccaugaaugaagguucaauuaugugguuggcaucauuagcaguuguaauugcaugugcuggugcaguuacauuaguaagaaagaaucgauggcugcuuuuaaaugugacaucagaggauuuagggaaaacauuuucgguaggaacaggaaauuguacuacaaauauacuugaagcaaaauauuggugcccagacucuauggaauauaauuguccaaauuuaaguccuagagaagaaccugacgauauagauuguugguguuaugguguagaaaauguaagaguagcauacggcaaaugcgauagugcaggacguucuagacguucaaggagagccauagaucugcccacucacgaaaaucacggauugaaaacacgacaagaaaaauggaugacugggcgaaugggagaaagacaacuacagaaaauugaaagaugguucguuagaaauccauucuuugccguaacagcuuuaacaauagccuauuuaguagguaguaauaugacacaaagaguaguaauagcauugcuaguguuagcaguuggaccagcuuauagugcacauugcauaggaauaacagauagagacuuuauagaaggaguacacgggggaacuuggguaagugccacuuuagaacaagauaaauguguuacagugauggcgccagauaaaccaagucuggacauaaguuuggaaacaguagcgauugauagacccgcagaaguaagaaaaguuuguuauaaugcuguucuaacccauguuaaaauaaaugauaaaugcccuagcaccggagaagcccaucuagcagaagaaaaugaaggagauaacgcauguaaacgaacauacucagauagaggauggggcaacggauguggcuuguuuggaaaagguagcauaguagcaugcgcuaaauuuacaugcgcaaagucaaugucauuauuugaaguagaucaaacaaaaauacaauauguaauaagagcucaauuacacgugggugcaaaacaagaaaauuggaauacagacauaaagacacuaaaguucgacgcauuaaguggaucacaagagguagaauuuauaggguacggaaaagcgacuuuagagugucaaguccaaacagcaguagauuucgguaacucauacauagcagaaauggaaacugaaaguuggauaguagauagacaaugggcacaagacuugacacuaccuuggcaaucaggaagcggaggaguauggagagaaaugcaucauuuaguagaauuugaaccaccucaugcagcaacaauaagaguauuagcccuaggaaaccaagaaggaaguuuaaaaacagcacuaacaggagcuaugagaguaacaaaagauacaaaugacaacaaucuauacaaauuacacggaggacauguaagcugccggguaaaguugagcgcacuaacauuaaaaggaacgaguuauaaaauaugcacagauaaaauguucuuuguuaaaaauccuacagauaccggucauggaacaguaguaaugcaaguaaaaguaaguaaaggcgcucccuguagaauaccuguaauagucgcagacgauuuaaccgcagcaauaaauaaaggaauauuagucacgguaaacccaauagcgucaacaaaugaugaugaaguauuaauagaaguuaacccaccuuuuggagacaguuauauaauagucggaaggggugauaguagacuaacauaccaauggcauaaagaaggaagcucaauaggaaguacacuaggaaaagcauuuaguacaacauuaaaaggagcacaaagauuagcagcauuaggagauacagcaugggauuuuggaagcauaggaggaguauuuaauaguauagguagagcaguacaucaaguauuuggaggagcauuuagaacauuauuuggaggaaugaguuggauaacacaaggauuaaugggagcauuauuauuauggaugggaguaaaugcaagagauagaaguauagcauuagcauuuuuagcaacaggaggaguauuaguauuuuuagcaacaaauguacaugcaugaggacuagucccuguucccagagcccacuuuuuuuucuuuuuuugaaauaaaauagccugucuuucagaucuaaaaaaaaaaaaaaaaaaaaaaaaaaaaaaaaaaaaaaaaaaaaaaaaaaaaaaaaaaaaaaaaugcaucccccccccccccccccccccccccccccccaaaggcucuuuucagagccaccagaauu

SEQ ID NO: 1763 - RNA, 2353 nt, Artificial Sequence
  mRNA product Design c-5 comprising derived and/or modified sequence from YFV__NC_002031.1__X-SS-prME (polyprotein: aa92-778) (opt6)
gggagagcggcucggccauuuugucccagucaguccggaggcugcggcugcagaaguaccgccugcggaguaacugcaaagaagcuuaccaugagaggauuaucaaguagaaaaagaagaucacaugauguacuaaccgugcaauuuuugaucuuagggaugcucuuaaugacaggagguguuacauuaguaagaaagaaucgauggcugcuuuuaaaugugacaucagaggauuuagggaaaacauuuucgguaggaacaggaaauuguacuacaaauauacuugaagcaaaauauuggugcccagacucuauggaauauaauuguccaaauuuaaguccuagagaagaaccugacgauauagauuguugguguuaugguguagaaaauguaagaguagcauacggcaaaugcgauagugcaggacguucuagacguucaaggagagccauagaucugcccacucacgaaaaucacggauugaaaacacgacaagaaaaauggaugacugggcgaaugggagaaagacaacuacagaaaauugaaagaugguucguuagaaauccauucuuugccguaacagcuuuaacaauagccuauuuaguagguaguaauaugacacaaagaguaguaauagcauugcuaguguuagcaguuggaccagcuuauagugcacauugcauaggaauaacagauagagacuuuauagaaggaguacacgggggaacuuggguaagugccacuuuagaacaagauaaauguguuacagugauggcgccagauaaaccaagucuggacauaaguuuggaaacaguagcgauugauagacccgcagaaguaagaaaaguuuguuauaaugcuguucuaacccauguuaaaauaaaugauaaaugcccuagcaccggagaagcccaucuagcagaagaaaaugaaggagauaacgcauguaaacgaacauacucagauagaggauggggcaacggauguggcuuguuuggaaaagguagcauaguagcaugcgcuaaauuuacaugcgcaaagucaaugucauuauuugaaguagaucaaacaaaaauacaauauguaauaagagcucaauuacacgugggugcaaaacaagaaaauuggaauacagacauaaagacacuaaaguucgacgcauuaaguggaucacaagagguagaauuuauaggguacggaaaagcgacuuuagagugucaaguccaaacagcaguagauuucgguaacucauacauagcagaaauggaaacugaaaguuggauaguagauagacaaugggcacaagacuugacacuaccuuggcaaucaggaagcggaggaguauggagagaaaugcaucauuuaguagaauuugaaccaccucaugcagcaacaauaagaguauuagcccuaggaaaccaagaaggaaguuuaaaaacagcacuaacaggagcuaugagaguaacaaaagauacaaaugacaacaaucuauacaaauuacacggaggacauguaagcugccggguaaaguugagcgcacuaacauuaaaaggaacgaguuauaaaauaugcacagauaaaauguucuuuguuaaaaauccuacagauaccggucauggaacaguaguaaugcaaguaaaaguaaguaaaggcgcucccuguagaauaccuguaauagucgcagacgauuuaaccgcagcaauaaauaaaggaauauuagucacgguaaacccaauagcgucaacaaaugaugaugaaguauuaauagaaguuaacccaccuuuuggagacaguuauauaauagucggaaggggugauaguagacuaacauaccaauggcauaaagaaggaagcucaauaggaaaauuauuuacucaaaccaugaaagguguagaaaggcuagcuguuaugggugacacagcaugggauuuuucaagcgcaggaggguucuuuacaucaguagguaaaggaauacauacaguauuuggaagugcauuucaaggauuauuuggugguuuaaauuggauaacaaaaguaauaaugggcgcaguuuuaauauggguagguauaaacacaagaaauaugacaaugucuaugaguaugauauuggucggaguaauaaugauguuuuuaucacuaggagugggugcaugaggacuagucccuguucccagagcccacuuuuuuuucuuuuuuugaaauaaaauagccugucuuucagaucuaaaaaaaaaaaaaaaaaaaaaaaaaaaaaaaaaaaaaaaaaaaaaaaaaaaaaaaaaaaaaaaaugcaucccccccccccccccccccccccccccccccaaaggcucuuuucagagccaccagaauu

SEQ ID NO: 1764 - RNA, 2356 nt, Artificial Sequence
  mRNA product Design c-5 comprising derived and/or modified sequence from YFV__NC_002031.1__SSjev(V3)-prME-XX (polyprotein: aa122-788) (opt6)
gggagagcggcucggccauuuugucccagucaguccggaggcugcggcugcagaaguaccgccugcggaguaacugcaaagaagcuuaccaugaaugaagguucaauuaugugguuggcaucauuagcaguuguaauugcaugugcuggugcaguuacauuaguaagaaagaaucgauggcugcuuuuaaaugugacaucagaggauuuagggaaaacauuuucgguaggaacaggaaauuguacuacaaauauacuugaagcaaaauauuggugcccagacucuauggaauauaauuguccaaauuuaaguccuagagaagaaccugacgauauagauuguugguguuaugguguagaaaauguaagaguagcauacggcaaaugcgauagugcaggacguucuagacguucaaggagagccauagaucugcccacucacgaaaaucacggauugaaaacacgacaagaaaaauggaugacugggcgaaugggagaaagacaacuacagaaaauugaaagaugguucguuagaaauccauucuuugccguaacagcuuuaacaauagccuauuuaguagguaguaauaugacacaaagaguaguaauagcauugcuaguguuagcaguuggaccagcuuauagugcacauugcauaggaauaacagauagagacuuuauagaaggaguacacgggggaacuuggguaagugccacuuuagaacaagauaaauguguuacagugauggcgccagauaaaccaagucuggacauaaguuuggaaacaguagcgauugauagacccgcagaaguaagaaaaguuuguuauaaugcuguucuaacccauguuaaaauaaaugauaaaugcccuagcaccggagaagcccaucuagcagaagaaaaugaaggagauaacgcauguaaacgaacauacucagauagaggauggggcaacggauguggcuuguuuggaaaagguagcauaguagcaugcgcuaaauuuacaugcgcaaagucaaugucauuauuugaaguagaucaaacaaaaauacaauauguaauaagagcucaauuacacgugggugcaaaacaagaaaauuggaauacagacauaaagacacuaaaguucgacgcauuaaguggaucacaagagguagaauuuauaggguacggaaaagcgacuuuagagugucaaguccaaacagcaguagauuucgguaacucauacauagcagaaauggaaacugaaaguuggauaguagauagacaaugggcacaagacuugacacuaccuuggcaaucaggaagcggaggaguauggagagaaaugcaucauuuaguagaauuugaaccaccucaugcagcaacaauaagaguauuagcccuaggaaaccaagaaggaaguuuaaaaacagcacuaacaggagcuaugagaguaacaaaagauacaaaugacaacaaucuauacaaauuacacggaggacauguaagcugccggguaaaguugagcgcacuaacauuaaaaggaacgaguuauaaaauaugcacagauaaaauguucuuuguuaaaaauccuacagauaccggucauggaacaguaguaaugcaaguaaaaguaaguaaaggcgcucccuguagaauaccuguaauagucgcagacgauuuaaccgcagcaauaaauaaaggaauauuagucacgguaaacccaauagcgucaacaaaugaugaugaaguauuaauagaaguuaacccaccuuuuggagacaguuauauaauagucggaaggggugauaguagacuaacauaccaauggcauaaagaaggaagcucaauaggaaaauuauuuacucaaaccaugaaagguguagaaaggcuagcuguuaugggugacacagcaugggauuuuucaagcgcaggaggguucuuuacaucaguagguaaaggaauacauacaguauuuggaagugcauuucaaggauuauuuggugguuuaaauuggauaacaaaaguaauaaugggcgcaguuuuaauauggguagguauaaacacaagaaauaugacaaugucuaugaguaugauauuggucggaguaauaaugauguuuuuaucacuaggagugggugcagaucaagguugcgcuauuaauuuuggaaaaugaggacuagucccuguucccagagcccacuuuuuuuucuuuuuuugaaauaaaauagccugucuuucagaucuaaaaaaaaaaaaaaaaaaaaaaaaaaaaaaaaaaaaaaaaaaaaaaaaaaaaaaaaaaaaaaaaugcaucccccccccccccccccccccccccccccccaaaggcucuuuucagagccaccagaauu

SEQ ID NO: 1765 - RNA, 2365 nt, Artificial Sequence
  mRNA product Design c-5 comprising derived and/or modified sequence from YFV__NC_002031.1__X-SS-prMEdelstem_TM-JEV (polyprotein: aa92-681) (opt11)
gggagagcggcucggccauuuugucccagucaguccggaggcugcggcugcagaaguaccgccugcggaguaacugcaaagaagcuuaccaugcggggacuaagcagcagaaaaagacgcagccacgaugugcucaccgugcaauuccucauacuggggaugcuccuaaugaccggaggcgugacccuaguaaggaaaaacagauggcuacuacuaaacguaaccucagaagaucuaggaaagacauuuucagucggcacaggcaacugcacaaccaacauacuagaagcaaaauauuggugcccagacagcauggaauacaacugucccaaccucagcccaagagaggaaccagacgacauagacugcugguguuacggaguagaaaacguaagaguggcauacggcaaaugcgacagcgcaggcaggagccgaagaucccgcagagccaucgacuugcccacgcacgaaaaccacggccucaaaacacgacaagaaaaauggaugacagggcgaaugggagaacgacagcuccagaaaauagaacgaugguucguccggaacccguucuucgcaguaacggcacuaacaaucgcauaccucguaggcagcaacaugacacaaagaguggucaucgcgcuacucguacuagcaguggggcccgcauacagugcacacugcauaggaaucacagaccgugacuucaucgaaggcguacacggaggaacguggguaagcgcgacacuggaacaagacaaaugcgugacaguaauggcaccagacaaaccaagccuagacauaucccuagaaacggucgccaucgaccgucccgcagaaguacgaaagguaugcuauaaugcaguccucacacacgucaaaauaaacgacaaaugccccagcacgggcgaagcacaccucgccgaagaaaacgaaggggauaacgcgugcaaacgcaccuacuccgacaggggauggggcaacggaugcggacuguucggaaaaggauccauagucgcaugcgcaaaauuuaccugcgcaaaaagcaugagcuuguucgagguagaccaaacgaagauccaauacguaauccgagcucaacuacacguuggggccaagcaagagaacuggaauacggacaucaaaacacuaaaauucgacgcacucuccggcucacaagaagucgaguucaucggcuacggcaaagcaacacuagaaugccaaguacaaacagcgguggacuucggcaacagcuacauagcagaaauggaaacagaaagcuggauaguagaccgacaaugggcacaagaccuaacucugccauggcaaagcggcucaggaggaguguggagagagaugcaccaccugguagaguucgaacccccacacgcagcaacaauaaggguacuggcacuaggcaaccaagaaggcagccuaaaaaccgcacucacaggagccaugcgcgugacgaaggacaccaacgacaacaaccucuacaaacuccacggagggcacguauccugccgcguaaaacuaucagcacuaacgcuaaaaggaacaagcuacaaaauaugcacagacaaaauguucuucgucaaaaaccccacagacacaggccacggcacagucguaaugcaagugaaggucagcaagggggcccccugccgaaucccagucauaguggcagacgaccucacggccgccaucaacaaagggauccugguaacagugaacccaauagcaucgaccaacgacgacgaaguccucauagaagugaaucccccguucggcgacagcuacaucaucguaggacgcggcgacucccgacugacguaccaauggcauaaagaaggcagcagcauugggagcacgcucgggaaagcguucucgaccacgcucaagggcgcgcaaaggcucgcggccuugggcgauaccgcgugggauuucgggagcauaggcggggucuuuaacucgaucgggcgcgcgguccaucaaguguucgggggcgcguucaggaccuuguucgggggcaugagcuggaucacgcaagggcucaugggcgcgcucuugcucuggaugggggucaaugccagggacaggagcauagccuuggccuuucucgcgaccgggggcgugcucguguucuuggccacgaacgugcacgcgugaggacuagucccuguucccagagcccacuuuuuuuucuuuuuuugaaauaaaauagccugucuuucagaucuaaaaaaaaaaaaaaaaaaaaaaaaaaaaaaaaaaaaaaaaaaaaaaaaaaaaaaaaaaaaaaaaugcaucccccccccccccccccccccccccccccccaaaggcucuuuucagagccaccagaauu

SEQ ID NO: 1766 - RNA, 2338 nt, Artificial Sequence
  mRNA product Design c-5 comprising derived and/or modified sequence from YFV__NC_002031.1__SSjev(V3)-prMEdelstem_TM-JEV (polyprotein: aa122-681) (opt11)
gggagagcggcucggccauuuugucccagucaguccggaggcugcggcugcagaaguaccgccugcggaguaacugcaaagaagcuuaccaugaacgagggcucgaucaugugguuggccucgcucgcggucgugaucgcgugcgcgggcgcggugacccuaguaaggaaaaacagauggcuacuacuaaacguaaccucagaagaucuaggaaagacauuuucagucggcacaggcaacugcacaaccaacauacuagaagcaaaauauuggugcccagacagcauggaauacaacugucccaaccucagcccaagagaggaaccagacgacauagacugcugguguuacggaguagaaaacguaagaguggcauacggcaaaugcgacagcgcaggcaggagccgaagaucccgcagagccaucgacuugcccacgcacgaaaaccacggccucaaaacacgacaagaaaaauggaugacagggcgaaugggagaacgacagcuccagaaaauagaacgaugguucguccggaacccguucuucgcaguaacggcacuaacaaucgcauaccucguaggcagcaacaugacacaaagaguggucaucgcgcuacucguacuagcaguggggcccgcauacagugcacacugcauaggaaucacagaccgugacuucaucgaaggcguacacggaggaacguggguaagcgcgacacuggaacaagacaaaugcgugacaguaauggcaccagacaaaccaagccuagacauaucccuagaaacggucgccaucgaccgucccgcagaaguacgaaagguaugcuauaaugcaguccucacacacgucaaaauaaacgacaaaugccccagcacgggcgaagcacaccucgccgaagaaaacgaaggggauaacgcgugcaaacgcaccuacuccgacaggggauggggcaacggaugcggacuguucggaaaaggauccauagucgcaugcgcaaaauuuaccugcgcaaaaagcaugagcuuguucgagguagaccaaacgaagauccaauacguaauccgagcucaacuacacguuggggccaagcaagagaacuggaauacggacaucaaaacacuaaaauucgacgcacucuccggcucacaagaagucgaguucaucggcuacggcaaagcaacacuagaaugccaaguacaaacagcgguggacuucggcaacagcuacauagcagaaauggaaacagaaagcuggauaguagaccgacaaugggcacaagaccuaacucugccauggcaaagcggcucaggaggaguguggagagagaugcaccaccugguagaguucgaacccccacacgcagcaacaauaaggguacuggcacuaggcaaccaagaaggcagccuaaaaaccgcacucacaggagccaugcgcgugacgaaggacaccaacgacaacaaccucuacaaacuccacggagggcacguauccugccgcguaaaacuaucagcacuaacgcuaaaaggaacaagcuacaaaauaugcacagacaaaauguucuucgucaaaaaccccacagacacaggccacggcacagucguaaugcaagugaaggucagcaagggggcccccugccgaaucccagucauaguggcagacgaccucacggccgccaucaacaaagggauccugguaacagugaacccaauagcaucgaccaacgacgacgaaguccucauagaagugaaucccccguucggcgacagcuacaucaucguaggacgcggcgacucccgacugacguaccaauggcauaaagaaggcagcagcauugggagcacgcucgggaaagcguucucgaccacgcucaagggcgcgcaaaggcucgcggccuugggcgauaccgcgugggauuucgggagcauaggcggggucuuuaacucgaucgggcgcgcgguccaucaaguguucgggggcgcguucaggaccuuguucgggggcaugagcuggaucacgcaagggcucaugggcgcgcucuugcucuggaugggggucaaugccagggacaggagcauagccuuggccuuucucgcgaccgggggcgugcucguguucuuggccacgaacgugcacgcgugaggacuagucccuguucccagagcccacuuuuuuuucuuuuuuugaaauaaaauagccugucuuucagaucuaaaaaaaaaaaaaaaaaaaaaaaaaaaaaaaaaaaaaaaaaaaaaaaaaaaaaaaaaaaaaaaaugcaucccccccccccccccccccccccccccccccaaaggcucuuuucagagccaccagaauu

SEQ ID NO: 1767 - RNA, 2353 nt, Artificial Sequence
  mRNA product Design c-5 comprising derived and/or modified sequence from YFV__NC_002031.1__X-SS-prME (polyprotein: aa92-778) (opt11)
gggagagcggcucggccauuuugucccagucaguccggaggcugcggcugcagaaguaccgccugcggaguaacugcaaagaagcuuaccaugcggggacuaagcagcagaaaaagacgcagccacgaugugcucaccgugcaauuccucauacuggggaugcuccuaaugaccggaggcgugacccuaguaaggaaaaacagauggcuacuacuaaacguaaccucagaagaucuaggaaagacauuuucagucggcacaggcaacugcacaaccaacauacuagaagcaaaauauuggugcccagacagcauggaauacaacugucccaaccucagcccaagagaggaaccagacgacauagacugcugguguuacggaguagaaaacguaagaguggcauacggcaaaugcgacagcgcaggcaggagccgaagaucccgcagagccaucgacuugcccacgcacgaaaaccacggccucaaaacacgacaagaaaaauggaugacagggcgaaugggagaacgacagcuccagaaaauagaacgaugguucguccggaacccguucuucgcaguaacggcacuaacaaucgcauaccucguaggcagcaacaugacacaaagaguggucaucgcgcuacucguacuagcaguggggcccgcauacagugcacacugcauaggaaucacagaccgugacuucaucgaaggcguacacggaggaacguggguaagcgcgacacuggaacaagacaaaugcgugacaguaauggcaccagacaaaccaagccuagacauaucccuagaaacggucgccaucgaccgucccgcagaaguacgaaagguaugcuauaaugcaguccucacacacgucaaaauaaacgacaaaugccccagcacgggcgaagcacaccucgccgaagaaaacgaaggggauaacgcgugcaaacgcaccuacuccgacaggggauggggcaacggaugcggacuguucggaaaaggauccauagucgcaugcgcaaaauuuaccugcgcaaaaagcaugagcuuguucgagguagaccaaacgaagauccaauacguaauccgagcucaacuacacguuggggccaagcaagagaacuggaauacggacaucaaaacacuaaaauucgacgcacucuccggcucacaagaagucgaguucaucggcuacggcaaagcaacacuagaaugccaaguacaaacagcgguggacuucggcaacagcuacauagcagaaauggaaacagaaagcuggauaguagaccgacaaugggcacaagaccuaacucugccauggcaaagcggcucaggaggaguguggagagagaugcaccaccugguagaguucgaacccccacacgcagcaacaauaaggguacuggcacuaggcaaccaagaaggcagccuaaaaaccgcacucacaggagccaugcgcgugacgaaggacaccaacgacaacaaccucuacaaacuccacggagggcacguauccugccgcguaaaacuaucagcacuaacgcuaaaaggaacaagcuacaaaauaugcacagacaaaauguucuucgucaaaaaccccacagacacaggccacggcacagucguaaugcaagugaaggucagcaagggggcccccugccgaaucccagucauaguggcagacgaccucacggccgccaucaacaaagggauccugguaacagugaacccaauagcaucgaccaacgacgacgaaguccucauagaagugaaucccccguucggcgacagcuacaucaucguaggacgcggcgacucccgacugacguaccaauggcauaaagaaggcagcagcauuggaaaacuauucacccaaaccaugaagggcgucgaaagacucgcggugaugggagacaccgcaugggacuucucgagcgcaggcggcuucuucacaagcguaggaaaagggauucacacaguauucggauccgcauuccaaggccucuucgggggacuaaacuggauaacgaaaguaauaaugggagcaguucucauauggguaggaaucaacacacgaaacaugacaauguccaugucaaugauacucguaggcguaaucaugauguuucugucacucggagugggagcaugaggacuagucccuguucccagagcccacuuuuuuuucuuuuuuugaaauaaaauagccugucuuucagaucuaaaaaaaaaaaaaaaaaaaaaaaaaaaaaaaaaaaaaaaaaaaaaaaaaaaaaaaaaaaaaaaaugcaucccccccccccccccccccccccccccccccaaaggcucuuuucagagccaccagaauu

SEQ ID NO: 1768 - RNA, 2356 nt, Artificial Sequence
  mRNA product Design c-5 comprising derived and/or modified sequence from YFV__NC_002031.1__SSjev(V3)-prME-XX (polyprotein: aa122-788) (opt11)
gggagagcggcucggccauuuugucccagucaguccggaggcugcggcugcagaaguaccgccugcggaguaacugcaaagaagcuuaccaugaacgagggcucgaucaugugguuggccucgcucgcggucgugaucgcgugcgcgggcgcggugacccuaguaaggaaaaacagauggcuacuacuaaacguaaccucagaagaucuaggaaagacauuuucagucggcacaggcaacugcacaaccaacauacuagaagcaaaauauuggugcccagacagcauggaauacaacugucccaaccucagcccaagagaggaaccagacgacauagacugcugguguuacggaguagaaaacguaagaguggcauacggcaaaugcgacagcgcaggcaggagccgaagaucccgcagagccaucgacuugcccacgcacgaaaaccacggccucaaaacacgacaagaaaaauggaugacagggcgaaugggagaacgacagcuccagaaaauagaacgaugguucguccggaacccguucuucgcaguaacggcacuaacaaucgcauaccucguaggcagcaacaugacacaaagaguggucaucgcgcuacucguacuagcaguggggcccgcauacagugcacacugcauaggaaucacagaccgugacuucaucgaaggcguacacggaggaacguggguaagcgcgacacuggaacaagacaaaugcgugacaguaauggcaccagacaaaccaagccuagacauaucccuagaaacggucgccaucgaccgucccgcagaaguacgaaagguaugcuauaaugcaguccucacacacgucaaaauaaacgacaaaugccccagcacgggcgaagcacaccucgccgaagaaaacgaaggggauaacgcgugcaaacgcaccuacuccgacaggggauggggcaacggaugcggacuguucggaaaaggauccauagucgcaugcgcaaaauuuaccugcgcaaaaagcaugagcuuguucgagguagaccaaacgaagauccaauacguaauccgagcucaacuacacguuggggccaagcaagagaacuggaauacggacaucaaaacacuaaaauucgacgcacucuccggcucacaagaagucgaguucaucggcuacggcaaagcaacacuagaaugccaaguacaaacagcgguggacuucggcaacagcuacauagcagaaauggaaacagaaagcuggauaguagaccgacaaugggcacaagaccuaacucugccauggcaaagcggcucaggaggaguguggagagagaugcaccaccugguagaguucgaacccccacacgcagcaacaauaaggguacuggcacuaggcaaccaagaaggcagccuaaaaaccgcacucacaggagccaugcgcgugacgaaggacaccaacgacaacaaccucuacaaacuccacggagggcacguauccugccgcguaaaacuaucagcacuaacgcuaaaaggaacaagcuacaaaauaugcacagacaaaauguucuucgucaaaaaccccacagacacaggccacggcacagucguaaugcaagugaaggucagcaagggggcccccugccgaaucccagucauaguggcagacgaccucacggccgccaucaacaaagggauccugguaacagugaacccaauagcaucgaccaacgacgacgaaguccucauagaagugaaucccccguucggcgacagcuacaucaucguaggacgcggcgacucccgacugacguaccaauggcauaaagaaggcagcagcauuggaaaacuauucacccaaaccaugaagggcgucgaaagacucgcggugaugggagacaccgcaugggacuucucgagcgcaggcggcuucuucacaagcguaggaaaagggauucacacaguauucggauccgcauuccaaggccucuucgggggacuaaacuggauaacgaaaguaauaaugggagcaguucucauauggguaggaaucaacacacgaaacaugacaauguccaugucaaugauacucguaggcguaaucaugauguuucugucacucggagugggagcagaccaagguugcgccauaaacuucggcaagugaggacuagucccuguucccagagcccacuuuuuuuucuuuuuuugaaauaaaauagccugucuuucagaucuaaaaaaaaaaaaaaaaaaaaaaaaaaaaaaaaaaaaaaaaaaaaaaaaaaaaaaaaaaaaaaaaugcaucccccccccccccccccccccccccccccccaaaggcucuuuucagagccaccagaauu

SEQ ID NO: 1769 - RNA, 2374 nt, Artificial Sequence
  mRNA product Design d-1 comprising derived and/or modified sequence from YFV__NC_002031.1__X-SS-prMEdelstem_TM-JEV (polyprotein: aa92-681) (wt)
gggagacccgugacccggaaguuguacggcuacgcgacuuucccucccacaaacccucgcgcccuuccuuuccuacuugggcccggcagaaagcuuaccaugagaggauuguccucaaggaaacgccguucccaugauguucugacugugcaauuccuaauuuugggaaugcuguugaugacggguggagugaccuuggugcggaaaaacagaugguugcuccuaaaugugacaucugaggaccucgggaaaacauucucugugggcacaggcaacugcacaacaaacauuuuggaagccaaguacuggugcccagacucaauggaauacaacugucccaaucucaguccaagagaggagccagaugacauugauugcuggugcuaugggguggaaaacguuagagucgcauaugguaagugugacucagcaggcaggucuaggaggucaagaagggccauugacuugccuacgcaugaaaaccaugguuugaagacccggcaagaaaaauggaugacuggaagaaugggugaaaggcaacuccaaaagauugagagaugguucgugaggaaccccuuuuuugcagugacggcucugaccauugccuaccuugugggaagcaacaugacgcaacgagucgugauugcccuacuggucuuggcuguugguccggccuacucagcucacugcauuggaauuacugacagggauuucauugagggggugcauggaggaacuuggguuucagcuacccuggagcaagacaagugugucacuguuauggccccugacaagccuucauuggacaucucacuagagacaguagccauugauagaccugcugaggugaggaaaguguguuacaaugcaguucucacucaugugaagauuaaugacaagugccccagcacuggagaggcccaccuagcugaagagaacgaaggggacaaugcgugcaagcgcacuuauucugauagaggcuggggcaauggcuguggccuauuugggaaagggagcauuguggcaugcgccaaauucacuugugccaaauccaugaguuuguuugagguugaucagaccaaaauucaguaugucaucagagcacaauugcauguaggggccaagcaggaaaauuggaauaccgacauuaagacucucaaguuugaugcccugucaggcucccaggaagucgaguucauuggguauggaaaagcuacacuggaaugccaggugcaaacugcgguggacuuugguaacaguuacaucgcugagauggaaacagagagcuggauaguggacagacagugggcccaggacuugacccugccauggcagaguggaaguggcgggguguggagagagaugcaucaucuugucgaauuugaaccuccgcaugccgccacuaucagaguacuggcccugggaaaccaggaaggcuccuugaaaacagcucuuacuggcgcaaugaggguuacaaaggacacaaaugacaacaaccuuuacaaacuacaugguggacauguuucuugcagagugaaauugucagcuuugacacucaaggggacauccuacaaaauaugcacugacaaaauguuuuuugucaagaacccaacugacacuggccauggcacuguugugaugcaggugaaagugucaaaaggagcccccugcaggauuccagugauaguagcugaugaucuuacagcggcaaucaauaaaggcauuuugguuacaguuaaccccaucgccucaaccaaugaugaugaagugcugauugaggugaacccaccuuuuggagacagcuacauuaucguugggagaggagauucacgucucacuuaccaguggcacaaagagggaagcucaauaggcagcacgcugggcaaggccuuuucaacaacuuugaagggagcucaaagacuggcagcguugggcgacacagccugggacuuuggcucuauuggaggggucuucaacuccauaggaagagccguucaccaaguguuugguggugccuucagaacacucuuugggggaaugucuuggaucacacaagggcuaaugggugcccuacugcucuggaugggcgucaacgcacgagaccgaucaauugcuuuggccuucuuagccacaggaggugugcucguguucuuagcgaccaaugugcacgccuaaggacuagucccuguucccagagcccacuuuuuuuucuuuuuuugaaauaaaauagccugucuuucagaucuaaaaaaaaaaaaaaaaaaaaaaaaaaaaaaaaaaaaaaaaaaaaaaaaaaaaaaaaaaaaaaaaugcaucccccccccccccccccccccccccccccccaaaggcucuuuucagagccaccagaauu

SEQ ID NO: 1770 - RNA, 2347 nt, Artificial Sequence
  mRNA product Design d-1 comprising derived and/or modified sequence from YFV__NC_002031.1__SSjev(V3)-prMEdelstem_TM-JEV (polyprotein: aa122-681) (wt)
gggagacccgugacccggaaguuguacggcuacgcgacuuucccucccacaaacccucgcgcccuuccuuuccuacuugggcccggcagaaagcuuaccaugaaugaaggcucaaucauguggcucgcgagcuuggcaguugucauagcuugugcaggagccgugaccuuggugcggaaaaacagaugguugcuccuaaaugugacaucugaggaccucgggaaaacauucucugugggcacaggcaacugcacaacaaacauuuuggaagccaaguacuggugcccagacucaauggaauacaacugucccaaucucaguccaagagaggagccagaugacauugauugcuggugcuaugggguggaaaacguuagagucgcauaugguaagugugacucagcaggcaggucuaggaggucaagaagggccauugacuugccuacgcaugaaaaccaugguuugaagacccggcaagaaaaauggaugacuggaagaaugggugaaaggcaacuccaaaagauugagagaugguucgugaggaaccccuuuuuugcagugacggcucugaccauugccuaccuugugggaagcaacaugacgcaacgagucgugauugcccuacuggucuuggcuguugguccggccuacucagcucacugcauuggaauuacugacagggauuucauugagggggugcauggaggaacuuggguuucagcuacccuggagcaagacaagugugucacuguuauggccccugacaagccuucauuggacaucucacuagagacaguagccauugauagaccugcugaggugaggaaaguguguuacaaugcaguucucacucaugugaagauuaaugacaagugccccagcacuggagaggcccaccuagcugaagagaacgaaggggacaaugcgugcaagcgcacuuauucugauagaggcuggggcaauggcuguggccuauuugggaaagggagcauuguggcaugcgccaaauucacuugugccaaauccaugaguuuguuugagguugaucagaccaaaauucaguaugucaucagagcacaauugcauguaggggccaagcaggaaaauuggaauaccgacauuaagacucucaaguuugaugcccugucaggcucccaggaagucgaguucauuggguauggaaaagcuacacuggaaugccaggugcaaacugcgguggacuuugguaacaguuacaucgcugagauggaaacagagagcuggauaguggacagacagugggcccaggacuugacccugccauggcagaguggaaguggcgggguguggagagagaugcaucaucuugucgaauuugaaccuccgcaugccgccacuaucagaguacuggcccugggaaaccaggaaggcuccuugaaaacagcucuuacuggcgcaaugaggguuacaaaggacacaaaugacaacaaccuuuacaaacuacaugguggacauguuucuugcagagugaaauugucagcuuugacacucaaggggacauccuacaaaauaugcacugacaaaauguuuuuugucaagaacccaacugacacuggccauggcacuguugugaugcaggugaaagugucaaaaggagcccccugcaggauuccagugauaguagcugaugaucuuacagcggcaaucaauaaaggcauuuugguuacaguuaaccccaucgccucaaccaaugaugaugaagugcugauugaggugaacccaccuuuuggagacagcuacauuaucguugggagaggagauucacgucucacuuaccaguggcacaaagagggaagcucaauaggcagcacgcugggcaaggccuuuucaacaacuuugaagggagcucaaagacuggcagcguugggcgacacagccugggacuuuggcucuauuggaggggucuucaacuccauaggaagagccguucaccaaguguuugguggugccuucagaacacucuuugggggaaugucuuggaucacacaagggcuaaugggugcccuacugcucuggaugggcgucaacgcacgagaccgaucaauugcuuuggccuucuuagccacaggaggugugcucguguucuuagcgaccaaugugcacgccuaaggacuagucccuguucccagagcccacuuuuuuuucuuuuuuugaaauaaaauagccugucuuucagaucuaaaaaaaaaaaaaaaaaaaaaaaaaaaaaaaaaaaaaaaaaaaaaaaaaaaaaaaaaaaaaaaaugcaucccccccccccccccccccccccccccccccaaaggcucuuuucagagccaccagaauu

SEQ ID NO: 1771 - RNA, 2362 nt, Artificial Sequence
  mRNA product Design d-1 comprising derived and/or modified sequence from YFV__NC_002031.1__X-SS-prME (polyprotein: aa92-778) (wt)
gggagacccgugacccggaaguuguacggcuacgcgacuuucccucccacaaacccucgcgcccuuccuuuccuacuugggcccggcagaaagcuuaccaugagaggauuguccucaaggaaacgccguucccaugauguucugacugugcaauuccuaauuuugggaaugcuguugaugacggguggagugaccuuggugcggaaaaacagaugguugcuccuaaaugugacaucugaggaccucgggaaaacauucucugugggcacaggcaacugcacaacaaacauuuuggaagccaaguacuggugcccagacucaauggaauacaacugucccaaucucaguccaagagaggagccagaugacauugauugcuggugcuaugggguggaaaacguuagagucgcauaugguaagugugacucagcaggcaggucuaggaggucaagaagggccauugacuugccuacgcaugaaaaccaugguuugaagacccggcaagaaaaauggaugacuggaagaaugggugaaaggcaacuccaaaagauugagagaugguucgugaggaaccccuuuuuugcagugacggcucugaccauugccuaccuugugggaagcaacaugacgcaacgagucgugauugcccuacuggucuuggcuguugguccggccuacucagcucacugcauuggaauuacugacagggauuucauugagggggugcauggaggaacuuggguuucagcuacccuggagcaagacaagugugucacuguuauggccccugacaagccuucauuggacaucucacuagagacaguagccauugauagaccugcugaggugaggaaaguguguuacaaugcaguucucacucaugugaagauuaaugacaagugccccagcacuggagaggcccaccuagcugaagagaacgaaggggacaaugcgugcaagcgcacuuauucugauagaggcuggggcaauggcuguggccuauuugggaaagggagcauuguggcaugcgccaaauucacuugugccaaauccaugaguuuguuugagguugaucagaccaaaauucaguaugucaucagagcacaauugcauguaggggccaagcaggaaaauuggaauaccgacauuaagacucucaaguuugaugcccugucaggcucccaggaagucgaguucauuggguauggaaaagcuacacuggaaugccaggugcaaacugcgguggacuuugguaacaguuacaucgcugagauggaaacagagagcuggauaguggacagacagugggcccaggacuugacccugccauggcagaguggaaguggcgggguguggagagagaugcaucaucuugucgaauuugaaccuccgcaugccgccacuaucagaguacuggcccugggaaaccaggaaggcuccuugaaaacagcucuuacuggcgcaaugaggguuacaaaggacacaaaugacaacaaccuuuacaaacuacaugguggacauguuucuugcagagugaaauugucagcuuugacacucaaggggacauccuacaaaauaugcacugacaaaauguuuuuugucaagaacccaacugacacuggccauggcacuguugugaugcaggugaaagugucaaaaggagcccccugcaggauuccagugauaguagcugaugaucuuacagcggcaaucaauaaaggcauuuugguuacaguuaaccccaucgccucaaccaaugaugaugaagugcugauugaggugaacccaccuuuuggagacagcuacauuaucguugggagaggagauucacgucucacuuaccaguggcacaaagagggaagcucaauaggaaaguuguucacucagaccaugaaaggcguggaacgccuggccgucaugggagacaccgccugggauuucagcuccgcuggaggguucuucacuucgguugggaaaggaauccauacgguguuuggcucugccuuucaggggcuauuuggcggcuugaacuggauaacaaaggucaucaugggggcgguacuuauauggguuggcaucaacacaagaaacaugacaauguccaugagcaugaucuugguaggagugaucaugauguuuuugucucuaggaguuggggcguaaggacuagucccuguucccagagcccacuuuuuuuucuuuuuuugaaauaaaauagccugucuuucagaucuaaaaaaaaaaaaaaaaaaaaaaaaaaaaaaaaaaaaaaaaaaaaaaaaaaaaaaaaaaaaaaaaugcaucccccccccccccccccccccccccccccccaaaggcucuuuucagagccaccagaauu

SEQ ID NO: 1772 - RNA, 2365 nt, Artificial Sequence
  mRNA product Design d-1 comprising derived and/or modified sequence from YFV__NC_002031.1__SSjev(V3)-prME-XX (polyprotein: aa122-788) (wt)
gggagacccgugacccggaaguuguacggcuacgcgacuuucccucccacaaacccucgcgcccuuccuuuccuacuugggcccggcagaaagcuuaccaugaaugaaggcucaaucauguggcucgcgagcuuggcaguugucauagcuugugcaggagccgugaccuuggugcggaaaaacagaugguugcuccuaaaugugacaucugaggaccucgggaaaacauucucugugggcacaggcaacugcacaacaaacauuuuggaagccaaguacuggugcccagacucaauggaauacaacugucccaaucucaguccaagagaggagccagaugacauugauugcuggugcuaugggguggaaaacguuagagucgcauaugguaagugugacucagcaggcaggucuaggaggucaagaagggccauugacuugccuacgcaugaaaaccaugguuugaagacccggcaagaaaaauggaugacuggaagaaugggugaaaggcaacuccaaaagauugagagaugguucgugaggaaccccuuuuuugcagugacggcucugaccauugccuaccuugugggaagcaacaugacgcaacgagucgugauugcccuacuggucuuggcuguugguccggccuacucagcucacugcauuggaauuacugacagggauuucauugagggggugcauggaggaacuuggguuucagcuacccuggagcaagacaagugugucacuguuauggccccugacaagccuucauuggacaucucacuagagacaguagccauugauagaccugcugaggugaggaaaguguguuacaaugcaguucucacucaugugaagauuaaugacaagugccccagcacuggagaggcccaccuagcugaagagaacgaaggggacaaugcgugcaagcgcacuuauucugauagaggcuggggcaauggcuguggccuauuugggaaagggagcauuguggcaugcgccaaauucacuugugccaaauccaugaguuuguuugagguugaucagaccaaaauucaguaugucaucagagcacaauugcauguaggggccaagcaggaaaauuggaauaccgacauuaagacucucaaguuugaugcccugucaggcucccaggaagucgaguucauuggguauggaaaagcuacacuggaaugccaggugcaaacugcgguggacuuugguaacaguuacaucgcugagauggaaacagagagcuggauaguggacagacagugggcccaggacuugacccugccauggcagaguggaaguggcgggguguggagagagaugcaucaucuugucgaauuugaaccuccgcaugccgccacuaucagaguacuggcccugggaaaccaggaaggcuccuugaaaacagcucuuacuggcgcaaugaggguuacaaaggacacaaaugacaacaaccuuuacaaacuacaugguggacauguuucuugcagagugaaauugucagcuuugacacucaaggggacauccuacaaaauaugcacugacaaaauguuuuuugucaagaacccaacugacacuggccauggcacuguugugaugcaggugaaagugucaaaaggagcccccugcaggauuccagugauaguagcugaugaucuuacagcggcaaucaauaaaggcauuuugguuacaguuaaccccaucgccucaaccaaugaugaugaagugcugauugaggugaacccaccuuuuggagacagcuacauuaucguugggagaggagauucacgucucacuuaccaguggcacaaagagggaagcucaauaggaaaguuguucacucagaccaugaaaggcguggaacgccuggccgucaugggagacaccgccugggauuucagcuccgcuggaggguucuucacuucgguugggaaaggaauccauacgguguuuggcucugccuuucaggggcuauuuggcggcuugaacuggauaacaaaggucaucaugggggcgguacuuauauggguuggcaucaacacaagaaacaugacaauguccaugagcaugaucuugguaggagugaucaugauguuuuugucucuaggaguuggggcggaucaaggaugcgccaucaacuuuggcaaguaaggacuagucccuguucccagagcccacuuuuuuuucuuuuuuugaaauaaaauagccugucuuucagaucuaaaaaaaaaaaaaaaaaaaaaaaaaaaaaaaaaaaaaaaaaaaaaaaaaaaaaaaaaaaaaaaaugcaucccccccccccccccccccccccccccccccaaaggcucuuuucagagccaccagaauu

SEQ ID NO: 1773 - RNA, 2374 nt, Artificial Sequence
  mRNA product Design d-1 comprising derived and/or modified sequence from YFV__NC_002031.1__X-SS-prMEdelstem_TM-JEV (polyprotein: aa92-681) (opt1)
gggagacccgugacccggaaguuguacggcuacgcgacuuucccucccacaaacccucgcgcccuuccuuuccuacuugggcccggcagaaagcuuaccaugcggggccugagcucccgcaagcggcgcagccacgacgugcucaccguccaguuccugauccuggggaugcuccugaugaccggcggggugacgcuggugcggaagaaccgcuggcuccugcugaacgucaccuccgaggaccucggcaagaccuucagcguggggaccggcaacugcacgaccaacauccuggaggccaaguacuggugccccgacuccauggaguacaacugcccgaaccugagcccccgggaggagcccgacgacaucgacugcuggugcuacggcguggagaacguccgcguggccuacgggaagugcgacuccgcgggccggagccgccggucccgccgggccaucgaccuccccacccacgagaaccacgggcugaagacccgccaggagaaguggaugacgggccggaugggggagcgccagcugcagaagaucgagcggugguucgugcgcaacccguucuucgccgucaccgcccucaccaucgccuaccuggugggcagcaacaugacccagcggguggucaucgcgcugcucgugcuggccgugggccccgccuacuccgcccacugcaucgggaucacggaccgcgacuucaucgagggcguccacgggggcaccugggugagcgcgacccuggagcaggacaagugcgugaccgucauggcccccgacaagcccucccucgacaucagccuggagacgguggccaucgaccggccggccgaggugcgcaaggucugcuacaacgccgugcugacccacgugaagaucaacgacaagugccccuccaccggcgaggcgcaccucgccgaggagaacgagggggacaacgccugcaagcggaccuacagcgaccggggcugggggaacggcugcgggcuguucggcaagggcuccaucgucgccugcgccaaguucacgugcgcgaagagcaugucccuguucgagguggaccagaccaagauccaguacgucauccgcgcccagcuccacgugggggccaagcaggagaacuggaacaccgacaucaagacccugaaguucgacgcccugagcggcagccaggagguggaguucaucggguacggcaaggccacgcucgagugccagguccagaccgcgguggacuucgggaacuccuacaucgccgagauggagaccgagagcuggaucguggaccggcagugggcccaggaccugacccugcccuggcaguccggcagcggcggggucuggcgcgagaugcaccaccucguggaguucgagcccccgcacgccgccacgauccgggugcuggcgcugggcaaccaggaggggucccucaagaccgcccugaccggcgccaugcgcgucaccaaggacacgaacgacaacaaccuguacaagcuccacgggggccacgugagcugccgggugaagcuguccgcccugacccucaagggcaccagcuacaagaucugcaccgacaagauguucuucgucaagaaccccacggacaccgggcacggcaccguggugaugcaggucaagguguccaagggggcgcccugccgcaucccggugaucgucgccgacgaccugaccgccgccaucaacaagggcauccuggugaccgugaacccgaucgccagcacgaacgacgacgagguccucaucgaggugaacccccccuucggcgacuccuacaucaucguggggcggggcgacagccgccugaccuaccaguggcacaaggagggguccagcaucggcagcacccuggggaaggccuucuccaccacgcucaagggcgcccagcgccuggcggcccugggggacaccgccugggacuucggcagcaucgggggcguguucaacuccaucggccgggccguccaccagguguucgggggcgccuuccgcacccucuucgggggcaugagcuggaucacccaggggcugaugggcgcgcugcuccuguggaugggggugaacgcccgggaccgcuccaucgcccuggccuuccucgcgacgggcggcguccugguguuccuggccaccaacgugcacgccugaggacuagucccuguucccagagcccacuuuuuuuucuuuuuuugaaauaaaauagccugucuuucagaucuaaaaaaaaaaaaaaaaaaaaaaaaaaaaaaaaaaaaaaaaaaaaaaaaaaaaaaaaaaaaaaaaugcaucccccccccccccccccccccccccccccccaaaggcucuuuucagagccaccagaauu

SEQ ID NO: 1774 - RNA, 2347 nt, Artificial Sequence
  mRNA product Design d-1 comprising derived and/or modified sequence from YFV__NC_002031.1__SSjev(V3)-prMEdelstem_TM-JEV (polyprotein: aa122-681) (opt1)
gggagacccgugacccggaaguuguacggcuacgcgacuuucccucccacaaacccucgcgcccuuccuuuccuacuugggcccggcagaaagcuuaccaugaacgagggcagcaucauguggcuggccucccucgccguggucaucgcgugcgccggggccgugacgcuggugcggaagaaccgcuggcuccugcugaacgucaccuccgaggaccucggcaagaccuucagcguggggaccggcaacugcacgaccaacauccuggaggccaaguacuggugccccgacuccauggaguacaacugcccgaaccugagcccccgggaggagcccgacgacaucgacugcuggugcuacggcguggagaacguccgcguggccuacgggaagugcgacuccgcgggccggagccgccggucccgccgggccaucgaccuccccacccacgagaaccacgggcugaagacccgccaggagaaguggaugacgggccggaugggggagcgccagcugcagaagaucgagcggugguucgugcgcaacccguucuucgccgucaccgcccucaccaucgccuaccuggugggcagcaacaugacccagcggguggucaucgcgcugcucgugcuggccgugggccccgccuacuccgcccacugcaucgggaucacggaccgcgacuucaucgagggcguccacgggggcaccugggugagcgcgacccuggagcaggacaagugcgugaccgucauggcccccgacaagcccucccucgacaucagccuggagacgguggccaucgaccggccggccgaggugcgcaaggucugcuacaacgccgugcugacccacgugaagaucaacgacaagugccccuccaccggcgaggcgcaccucgccgaggagaacgagggggacaacgccugcaagcggaccuacagcgaccggggcugggggaacggcugcgggcuguucggcaagggcuccaucgucgccugcgccaaguucacgugcgcgaagagcaugucccuguucgagguggaccagaccaagauccaguacgucauccgcgcccagcuccacgugggggccaagcaggagaacuggaacaccgacaucaagacccugaaguucgacgcccugagcggcagccaggagguggaguucaucggguacggcaaggccacgcucgagugccagguccagaccgcgguggacuucgggaacuccuacaucgccgagauggagaccgagagcuggaucguggaccggcagugggcccaggaccugacccugcccuggcaguccggcagcggcggggucuggcgcgagaugcaccaccucguggaguucgagcccccgcacgccgccacgauccgggugcuggcgcugggcaaccaggaggggucccucaagaccgcccugaccggcgccaugcgcgucaccaaggacacgaacgacaacaaccuguacaagcuccacgggggccacgugagcugccgggugaagcuguccgcccugacccucaagggcaccagcuacaagaucugcaccgacaagauguucuucgucaagaaccccacggacaccgggcacggcaccguggugaugcaggucaagguguccaagggggcgcccugccgcaucccggugaucgucgccgacgaccugaccgccgccaucaacaagggcauccuggugaccgugaacccgaucgccagcacgaacgacgacgagguccucaucgaggugaacccccccuucggcgacuccuacaucaucguggggcggggcgacagccgccugaccuaccaguggcacaaggagggguccagcaucggcagcacccuggggaaggccuucuccaccacgcucaagggcgcccagcgccuggcggcccugggggacaccgccugggacuucggcagcaucgggggcguguucaacuccaucggccgggccguccaccagguguucgggggcgccuuccgcacccucuucgggggcaugagcuggaucacccaggggcugaugggcgcgcugcuccuguggaugggggugaacgcccgggaccgcuccaucgcccuggccuuccucgcgacgggcggcguccugguguuccuggccaccaacgugcacgccugaggacuagucccuguucccagagcccacuuuuuuuucuuuuuuugaaauaaaauagccugucuuucagaucuaaaaaaaaaaaaaaaaaaaaaaaaaaaaaaaaaaaaaaaaaaaaaaaaaaaaaaaaaaaaaaaaugcaucccccccccccccccccccccccccccccccaaaggcucuuuucagagccaccagaauu

SEQ ID NO: 1775 - RNA, 2362 nt, Artificial Sequence
  mRNA product Design d-1 comprising derived and/or modified sequence from YFV__NC_002031.1__X-SS-prME (polyprotein: aa92-778) (opt1)
gggagacccgugacccggaaguuguacggcuacgcgacuuucccucccacaaacccucgcgcccuuccuuuccuacuugggcccggcagaaagcuuaccaugcggggccugagcucccgcaagcggcgcagccacgacgugcucaccguccaguuccugauccuggggaugcuccugaugaccggcggggugacgcuggugcggaagaaccgcuggcuccugcugaacgucaccuccgaggaccucggcaagaccuucagcguggggaccggcaacugcacgaccaacauccuggaggccaaguacuggugccccgacuccauggaguacaacugcccgaaccugagcccccgggaggagcccgacgacaucgacugcuggugcuacggcguggagaacguccgcguggccuacgggaagugcgacuccgcgggccggagccgccggucccgccgggccaucgaccuccccacccacgagaaccacgggcugaagacccgccaggagaaguggaugacgggccggaugggggagcgccagcugcagaagaucgagcggugguucgugcgcaacccguucuucgccgucaccgcccucaccaucgccuaccuggugggcagcaacaugacccagcggguggucaucgcgcugcucgugcuggccgugggccccgccuacuccgcccacugcaucgggaucacggaccgcgacuucaucgagggcguccacgggggcaccugggugagcgcgacccuggagcaggacaagugcgugaccgucauggcccccgacaagcccucccucgacaucagccuggagacgguggccaucgaccggccggccgaggugcgcaaggucugcuacaacgccgugcugacccacgugaagaucaacgacaagugccccuccaccggcgaggcgcaccucgccgaggagaacgagggggacaacgccugcaagcggaccuacagcgaccggggcugggggaacggcugcgggcuguucggcaagggcuccaucgucgccugcgccaaguucacgugcgcgaagagcaugucccuguucgagguggaccagaccaagauccaguacgucauccgcgcccagcuccacgugggggccaagcaggagaacuggaacaccgacaucaagacccugaaguucgacgcccugagcggcagccaggagguggaguucaucggguacggcaaggccacgcucgagugccagguccagaccgcgguggacuucgggaacuccuacaucgccgagauggagaccgagagcuggaucguggaccggcagugggcccaggaccugacccugcccuggcaguccggcagcggcggggucuggcgcgagaugcaccaccucguggaguucgagcccccgcacgccgccacgauccgggugcuggcgcugggcaaccaggaggggucccucaagaccgcccugaccggcgccaugcgcgucaccaaggacacgaacgacaacaaccuguacaagcuccacgggggccacgugagcugccgggugaagcuguccgcccugacccucaagggcaccagcuacaagaucugcaccgacaagauguucuucgucaagaaccccacggacaccgggcacggcaccguggugaugcaggucaagguguccaagggggcgcccugccgcaucccggugaucgucgccgacgaccugaccgccgccaucaacaagggcauccuggugaccgugaacccgaucgccagcacgaacgacgacgagguccucaucgaggugaacccccccuucggcgacuccuacaucaucguggggcggggcgacagccgccugaccuaccaguggcacaaggagggguccagcaucggcaagcuguucacccagaccaugaagggggucgagcggcuggcggugaugggcgacacggccugggacuucuccagcgccggcggguucuucaccuccgugggcaaggggauccacaccgucuucggcagcgccuuccaggggcucuucggcggccugaacuggaucaccaaggugaucaugggggccgugcugaucugggucggcaucaacacgcgcaacaugaccauguccaugagcaugauccucgugggggugaucaugauguuccugagccugggcgucggggcgugaggacuagucccuguucccagagcccacuuuuuuuucuuuuuuugaaauaaaauagccugucuuucagaucuaaaaaaaaaaaaaaaaaaaaaaaaaaaaaaaaaaaaaaaaaaaaaaaaaaaaaaaaaaaaaaaaugcaucccccccccccccccccccccccccccccccaaaggcucuuuucagagccaccagaauu

SEQ ID NO: 1776 - RNA, 2365 nt, Artificial Sequence
  mRNA product Design d-1 comprising derived and/or modified sequence from YFV__NC_002031.1__SSjev(V3)-prME-XX (polyprotein: aa122-788) (opt1)
gggagacccgugacccggaaguuguacggcuacgcgacuuucccucccacaaacccucgcgcccuuccuuuccuacuugggcccggcagaaagcuuaccaugaacgagggcagcaucauguggcuggccucccucgccguggucaucgcgugcgccggggccgugacgcuggugcggaagaaccgcuggcuccugcugaacgucaccuccgaggaccucggcaagaccuucagcguggggaccggcaacugcacgaccaacauccuggaggccaaguacuggugccccgacuccauggaguacaacugcccgaaccugagcccccgggaggagcccgacgacaucgacugcuggugcuacggcguggagaacguccgcguggccuacgggaagugcgacuccgcgggccggagccgccggucccgccgggccaucgaccuccccacccacgagaaccacgggcugaagacccgccaggagaaguggaugacgggccggaugggggagcgccagcugcagaagaucgagcggugguucgugcgcaacccguucuucgccgucaccgcccucaccaucgccuaccuggugggcagcaacaugacccagcggguggucaucgcgcugcucgugcuggccgugggccccgccuacuccgcccacugcaucgggaucacggaccgcgacuucaucgagggcguccacgggggcaccugggugagcgcgacccuggagcaggacaagugcgugaccgucauggcccccgacaagcccucccucgacaucagccuggagacgguggccaucgaccggccggccgaggugcgcaaggucugcuacaacgccgugcugacccacgugaagaucaacgacaagugccccuccaccggcgaggcgcaccucgccgaggagaacgagggggacaacgccugcaagcggaccuacagcgaccggggcugggggaacggcugcgggcuguucggcaagggcuccaucgucgccugcgccaaguucacgugcgcgaagagcaugucccuguucgagguggaccagaccaagauccaguacgucauccgcgcccagcuccacgugggggccaagcaggagaacuggaacaccgacaucaagacccugaaguucgacgcccugagcggcagccaggagguggaguucaucggguacggcaaggccacgcucgagugccagguccagaccgcgguggacuucgggaacuccuacaucgccgagauggagaccgagagcuggaucguggaccggcagugggcccaggaccugacccugcccuggcaguccggcagcggcggggucuggcgcgagaugcaccaccucguggaguucgagcccccgcacgccgccacgauccgggugcuggcgcugggcaaccaggaggggucccucaagaccgcccugaccggcgccaugcgcgucaccaaggacacgaacgacaacaaccuguacaagcuccacgggggccacgugagcugccgggugaagcuguccgcccugacccucaagggcaccagcuacaagaucugcaccgacaagauguucuucgucaagaaccccacggacaccgggcacggcaccguggugaugcaggucaagguguccaagggggcgcccugccgcaucccggugaucgucgccgacgaccugaccgccgccaucaacaagggcauccuggugaccgugaacccgaucgccagcacgaacgacgacgagguccucaucgaggugaacccccccuucggcgacuccuacaucaucguggggcggggcgacagccgccugaccuaccaguggcacaaggagggguccagcaucggcaagcuguucacccagaccaugaagggggucgagcggcuggcggugaugggcgacacggccugggacuucuccagcgccggcggguucuucaccuccgugggcaaggggauccacaccgucuucggcagcgccuuccaggggcucuucggcggccugaacuggaucaccaaggugaucaugggggccgugcugaucugggucggcaucaacacgcgcaacaugaccauguccaugagcaugauccucgugggggugaucaugauguuccugagccugggcgucggggcggaccagggcugcgccaucaacuucggcaagugaggacuagucccuguucccagagcccacuuuuuuuucuuuuuuugaaauaaaauagccugucuuucagaucuaaaaaaaaaaaaaaaaaaaaaaaaaaaaaaaaaaaaaaaaaaaaaaaaaaaaaaaaaaaaaaaaugcaucccccccccccccccccccccccccccccccaaaggcucuuuucagagccaccagaauu

SEQ ID NO: 1777 - RNA, 2374 nt, Artificial Sequence
  mRNA product Design d-1 comprising derived and/or modified sequence from YFV__NC_002031.1__X-SS-prMEdelstem_TM-JEV (polyprotein: aa92-681) (opt1)
gggagacccgugacccggaaguuguacggcuacgcgacuuucccucccacaaacccucgcgcccuuccuuuccuacuugggcccggcagaaagcuuaccaugcggggccugagcucccgcaagcggcgcagccacgacgugcucaccguccaguuccugauccuggggaugcuccugaugaccggcggggugacgcuggugcggaagaaccgcuggcuccugcugaacgucaccuccgaggaccucggcaagaccuucagcguggggaccggcaacugcacgaccaacauccuggaggccaaguacuggugccccgacuccauggaguacaacugcccgaaccugagcccccgggaggagcccgacgacaucgacugcuggugcuacggcguggagaacguccgcguggccuacgggaagugcgacuccgcgggccggagccgccggucccgccgggccaucgaccuccccacccacgagaaccacgggcugaagacccgccaggagaaguggaugacgggccggaugggggagcgccagcugcagaagaucgagcggugguucgugcgcaacccguucuucgccgucaccgcccucaccaucgccuaccuggugggcagcaacaugacccagcggguggucaucgcgcugcucgugcuggccgugggccccgccuacuccgcccacugcaucgggaucacggaccgcgacuucaucgagggcguccacgggggcaccugggugagcgcgacccuggagcaggacaagugcgugaccgucauggcccccgacaagcccucccucgacaucagccuggagacgguggccaucgaccggccggccgaggugcgcaaggucugcuacaacgccgugcugacccacgugaagaucaacgacaagugccccuccaccggcgaggcgcaccucgccgaggagaacgagggggacaacgccugcaagcggaccuacagcgaccggggcugggggaacggcugcgggcuguucggcaagggcuccaucgucgccugcgccaaguucacgugcgcgaaguccaugagccuguucgagguggaccagaccaagauccaguacgucauccgcgcccagcuccacgugggggccaagcaggagaacuggaacaccgacaucaagacccugaaguucgacgcccugagcggcagccaggagguggaguucaucggguacggcaaggccacgcucgagugccagguccagaccgcgguggacuucgggaacuccuacaucgccgagauggagaccgagagcuggaucguggaccggcagugggcccaggaccugacccugcccuggcaguccggcagcggcggggucuggcgcgagaugcaccaccucguggaguucgagcccccgcacgccgccacgauccgggugcuggcgcugggcaaccaggaggggucccucaagaccgcccugaccggcgccaugcgcgucaccaaggacacgaacgacaacaaccuguacaagcuccacgggggccacgugagcugccgggugaagcuguccgcccugacccucaagggcaccagcuacaagaucugcaccgacaagauguucuucgucaagaaccccacggacaccgggcacggcaccguggugaugcaggucaagguguccaagggggcgcccugccgcaucccggugaucgucgccgacgaccugaccgccgccaucaacaagggcauccuggugaccgugaacccgaucgccagcacgaacgacgacgagguccucaucgaggugaacccccccuucggcgacuccuacaucaucguggggcggggcgacagccgccugaccuaccaguggcacaaggagggguccagcaucggcagcacccuggggaaggccuucuccaccacgcucaagggcgcccagcgccuggcggcccugggggacaccgccugggacuucggcagcaucgggggcguguucaacuccaucggccgggccguccaccagguguucgggggcgccuuccgcacccucuucgggggcaugagcuggaucacccaggggcugaugggcgcgcugcuccuguggaugggggugaacgcccgggaccgcuccaucgcccuggccuuccucgcgacgggcggcguccugguguuccuggccaccaacgugcacgccugaggacuagucccuguucccagagcccacuuuuuuuucuuuuuuugaaauaaaauagccugucuuucagaucuaaaaaaaaaaaaaaaaaaaaaaaaaaaaaaaaaaaaaaaaaaaaaaaaaaaaaaaaaaaaaaaaugcaucccccccccccccccccccccccccccccccaaaggcucuuuucagagccaccagaauu

SEQ ID NO: 1778 - RNA, 2347 nt, Artificial Sequence
  mRNA product Design d-1 comprising derived and/or modified sequence from YFV__NC_002031.1__SSjev(V3)-prMEdelstem_TM-JEV (polyprotein: aa122-681) (opt1)
gggagacccgugacccggaaguuguacggcuacgcgacuuucccucccacaaacccucgcgcccuuccuuuccuacuugggcccggcagaaagcuuaccaugaacgagggcagcaucauguggcuggccucccucgccguggucaucgcgugcgccggggccgugacgcuggugcggaagaaccgcuggcuccugcugaacgucaccuccgaggaccucggcaagaccuucagcguggggaccggcaacugcacgaccaacauccuggaggccaaguacuggugccccgacuccauggaguacaacugcccgaaccugagcccccgggaggagcccgacgacaucgacugcuggugcuacggcguggagaacguccgcguggccuacgggaagugcgacuccgcgggccggagccgccggucccgccgggccaucgaccuccccacccacgagaaccacgggcugaagacccgccaggagaaguggaugacgggccggaugggggagcgccagcugcagaagaucgagcggugguucgugcgcaacccguucuucgccgucaccgcccucaccaucgccuaccuggugggcagcaacaugacccagcggguggucaucgcgcugcucgugcuggccgugggccccgccuacuccgcccacugcaucgggaucacggaccgcgacuucaucgagggcguccacgggggcaccugggugagcgcgacccuggagcaggacaagugcgugaccgucauggcccccgacaagcccucccucgacaucagccuggagacgguggccaucgaccggccggccgaggugcgcaaggucugcuacaacgccgugcugacccacgugaagaucaacgacaagugccccuccaccggcgaggcgcaccucgccgaggagaacgagggggacaacgccugcaagcggaccuacagcgaccggggcugggggaacggcugcgggcuguucggcaagggcuccaucgucgccugcgccaaguucacgugcgcgaaguccaugagccuguucgagguggaccagaccaagauccaguacgucauccgcgcccagcuccacgugggggccaagcaggagaacuggaacaccgacaucaagacccugaaguucgacgcccugagcggcagccaggagguggaguucaucggguacggcaaggccacgcucgagugccagguccagaccgcgguggacuucgggaacuccuacaucgccgagauggagaccgagagcuggaucguggaccggcagugggcccaggaccugacccugcccuggcaguccggcagcggcggggucuggcgcgagaugcaccaccucguggaguucgagcccccgcacgccgccacgauccgggugcuggcgcugggcaaccaggaggggucccucaagaccgcccugaccggcgccaugcgcgucaccaaggacacgaacgacaacaaccuguacaagcuccacgggggccacgugagcugccgggugaagcuguccgcccugacccucaagggcaccagcuacaagaucugcaccgacaagauguucuucgucaagaaccccacggacaccgggcacggcaccguggugaugcaggucaagguguccaagggggcgcccugccgcaucccggugaucgucgccgacgaccugaccgccgccaucaacaagggcauccuggugaccgugaacccgaucgccagcacgaacgacgacgagguccucaucgaggugaacccccccuucggcgacuccuacaucaucguggggcggggcgacagccgccugaccuaccaguggcacaaggagggguccagcaucggcagcacccuggggaaggccuucuccaccacgcucaagggcgcccagcgccuggcggcccugggggacaccgccugggacuucggcagcaucgggggcguguucaacuccaucggccgggccguccaccagguguucgggggcgccuuccgcacccucuucgggggcaugagcuggaucacccaggggcugaugggcgcgcugcuccuguggaugggggugaacgcccgggaccgcuccaucgcccuggccuuccucgcgacgggcggcguccugguguuccuggccaccaacgugcacgccugaggacuagucccuguucccagagcccacuuuuuuuucuuuuuuugaaauaaaauagccugucuuucagaucuaaaaaaaaaaaaaaaaaaaaaaaaaaaaaaaaaaaaaaaaaaaaaaaaaaaaaaaaaaaaaaaaugcaucccccccccccccccccccccccccccccccaaaggcucuuuucagagccaccagaauu

SEQ ID NO: 1779 - RNA, 2362 nt, Artificial Sequence
  mRNA product Design d-1 comprising derived and/or modified sequence from YFV__NC_002031.1__X-SS-prME (polyprotein: aa92-778) (opt1)
gggagacccgugacccggaaguuguacggcuacgcgacuuucccucccacaaacccucgcgcccuuccuuuccuacuugggcccggcagaaagcuuaccaugcggggccugagcucccgcaagcggcgcagccacgacgugcucaccguccaguuccugauccuggggaugcuccugaugaccggcggggugacgcuggugcggaagaaccgcuggcuccugcugaacgucaccuccgaggaccucggcaagaccuucagcguggggaccggcaacugcacgaccaacauccuggaggccaaguacuggugccccgacuccauggaguacaacugcccgaaccugagcccccgggaggagcccgacgacaucgacugcuggugcuacggcguggagaacguccgcguggccuacgggaagugcgacuccgcgggccggagccgccggucccgccgggccaucgaccuccccacccacgagaaccacgggcugaagacccgccaggagaaguggaugacgggccggaugggggagcgccagcugcagaagaucgagcggugguucgugcgcaacccguucuucgccgucaccgcccucaccaucgccuaccuggugggcagcaacaugacccagcggguggucaucgcgcugcucgugcuggccgugggccccgccuacuccgcccacugcaucgggaucacggaccgcgacuucaucgagggcguccacgggggcaccugggugagcgcgacccuggagcaggacaagugcgugaccgucauggcccccgacaagcccucccucgacaucagccuggagacgguggccaucgaccggccggccgaggugcgcaaggucugcuacaacgccgugcugacccacgugaagaucaacgacaagugccccuccaccggcgaggcgcaccucgccgaggagaacgagggggacaacgccugcaagcggaccuacagcgaccggggcugggggaacggcugcgggcuguucggcaagggcuccaucgucgccugcgccaaguucacgugcgcgaaguccaugagccuguucgagguggaccagaccaagauccaguacgucauccgcgcccagcuccacgugggggccaagcaggagaacuggaacaccgacaucaagacccugaaguucgacgcccugagcggcagccaggagguggaguucaucggguacggcaaggccacgcucgagugccagguccagaccgcgguggacuucgggaacuccuacaucgccgagauggagaccgagagcuggaucguggaccggcagugggcccaggaccugacccugcccuggcaguccggcagcggcggggucuggcgcgagaugcaccaccucguggaguucgagcccccgcacgccgccacgauccgggugcuggcgcugggcaaccaggaggggucccucaagaccgcccugaccggcgccaugcgcgucaccaaggacacgaacgacaacaaccuguacaagcuccacgggggccacgugagcugccgggugaagcuguccgcccugacccucaagggcaccagcuacaagaucugcaccgacaagauguucuucgucaagaaccccacggacaccgggcacggcaccguggugaugcaggucaagguguccaagggggcgcccugccgcaucccggugaucgucgccgacgaccugaccgccgccaucaacaagggcauccuggugaccgugaacccgaucgccagcacgaacgacgacgagguccucaucgaggugaacccccccuucggcgacuccuacaucaucguggggcggggcgacagccgccugaccuaccaguggcacaaggagggguccagcaucggcaagcuguucacccagaccaugaagggggucgagcggcuggcggugaugggcgacacggccugggacuucuccagcgccggcggguucuucaccuccgugggcaaggggauccacaccgucuucggcagcgccuuccaggggcuguucggcggccucaacuggaucaccaaggugaucaugggggccgugcugaucugggucggcaucaacacgcgcaacaugaccauguccaugagcaugauccucgugggggugaucaugauguuccugagccugggcgucggggcgugaggacuagucccuguucccagagcccacuuuuuuuucuuuuuuugaaauaaaauagccugucuuucagaucuaaaaaaaaaaaaaaaaaaaaaaaaaaaaaaaaaaaaaaaaaaaaaaaaaaaaaaaaaaaaaaaaugcaucccccccccccccccccccccccccccccccaaaggcucuuuucagagccaccagaauu

SEQ ID NO: 1780 - RNA, 2365 nt, Artificial Sequence
  mRNA product Design d-1 comprising derived and/or modified sequence from YFV__NC_002031.1__SSjev(V3)-prME-XX (polyprotein: aa122-788) (opt1)
gggagacccgugacccggaaguuguacggcuacgcgacuuucccucccacaaacccucgcgcccuuccuuuccuacuugggcccggcagaaagcuuaccaugaacgagggcagcaucauguggcuggccucccucgccguggucaucgcgugcgccggggccgugacgcuggugcggaagaaccgcuggcuccugcugaacgucaccuccgaggaccucggcaagaccuucagcguggggaccggcaacugcacgaccaacauccuggaggccaaguacuggugccccgacuccauggaguacaacugcccgaaccugagcccccgggaggagcccgacgacaucgacugcuggugcuacggcguggagaacguccgcguggccuacgggaagugcgacuccgcgggccggagccgccggucccgccgggccaucgaccuccccacccacgagaaccacgggcugaagacccgccaggagaaguggaugacgggccggaugggggagcgccagcugcagaagaucgagcggugguucgugcgcaacccguucuucgccgucaccgcccucaccaucgccuaccuggugggcagcaacaugacccagcggguggucaucgcgcugcucgugcuggccgugggccccgccuacuccgcccacugcaucgggaucacggaccgcgacuucaucgagggcguccacgggggcaccugggugagcgcgacccuggagcaggacaagugcgugaccgucauggcccccgacaagcccucccucgacaucagccuggagacgguggccaucgaccggccggccgaggugcgcaaggucugcuacaacgccgugcugacccacgugaagaucaacgacaagugccccuccaccggcgaggcgcaccucgccgaggagaacgagggggacaacgccugcaagcggaccuacagcgaccggggcugggggaacggcugcgggcuguucggcaagggcuccaucgucgccugcgccaaguucacgugcgcgaaguccaugagccuguucgagguggaccagaccaagauccaguacgucauccgcgcccagcuccacgugggggccaagcaggagaacuggaacaccgacaucaagacccugaaguucgacgcccugagcggcagccaggagguggaguucaucggguacggcaaggccacgcucgagugccagguccagaccgcgguggacuucgggaacuccuacaucgccgagauggagaccgagagcuggaucguggaccggcagugggcccaggaccugacccugcccuggcaguccggcagcggcggggucuggcgcgagaugcaccaccucguggaguucgagcccccgcacgccgccacgauccgggugcuggcgcugggcaaccaggaggggucccucaagaccgcccugaccggcgccaugcgcgucaccaaggacacgaacgacaacaaccuguacaagcuccacgggggccacgugagcugccgggugaagcuguccgcccugacccucaagggcaccagcuacaagaucugcaccgacaagauguucuucgucaagaaccccacggacaccgggcacggcaccguggugaugcaggucaagguguccaagggggcgcccugccgcaucccggugaucgucgccgacgaccugaccgccgccaucaacaagggcauccuggugaccgugaacccgaucgccagcacgaacgacgacgagguccucaucgaggugaacccccccuucggcgacuccuacaucaucguggggcggggcgacagccgccugaccuaccaguggcacaaggagggguccagcaucggcaagcuguucacccagaccaugaagggggucgagcggcuggcggugaugggcgacacggccugggacuucuccagcgccggcggguucuucaccuccgugggcaaggggauccacaccgucuucggcagcgccuuccaggggcuguucggcggccucaacuggaucaccaaggugaucaugggggccgugcugaucugggucggcaucaacacgcgcaacaugaccauguccaugagcaugauccucgugggggugaucaugauguuccugagccugggcgucggggcggaccagggcugcgccaucaacuucggcaagugaggacuagucccuguucccagagcccacuuuuuuuucuuuuuuugaaauaaaauagccugucuuucagaucuaaaaaaaaaaaaaaaaaaaaaaaaaaaaaaaaaaaaaaaaaaaaaaaaaaaaaaaaaaaaaaaaugcaucccccccccccccccccccccccccccccccaaaggcucuuuucagagccaccagaauu

SEQ ID NO: 1781 - RNA, 2374 nt, Artificial Sequence
  mRNA product Design d-1 comprising derived and/or modified sequence from YFV__NC_002031.1__X-SS-prMEdelstem_TM-JEV (polyprotein: aa92-681) (opt1)
gggagacccgugacccggaaguuguacggcuacgcgacuuucccucccacaaacccucgcgcccuuccuuuccuacuugggcccggcagaaagcuuaccaugcggggccugagcucccgcaagcggcgcagccacgacgugcucaccguccaguuccugauccuggggaugcuccugaugaccggcggggugacgcuggugcggaagaaccgcuggcuccugcugaacgucaccuccgaggaccucggcaagaccuucagcguggggaccggcaacugcacgaccaacauccuggaggccaaguacuggugccccgacuccauggaguacaacugccccaaccugagcccccgggaggagcccgacgacaucgacugcuggugcuacggcguggagaacguccgcguggccuacgggaagugcgacuccgcgggccggagccgccggucccgccgggccaucgaccuccccacccacgagaaccacgggcugaagacccgccaggagaaguggaugacgggccggaugggggagcgccagcugcagaagaucgagcggugguucgugcgcaacccguucuucgccgucaccgcccucaccaucgccuaccuggugggcagcaacaugacccagcggguggucaucgcgcugcucgugcuggccgugggccccgccuacuccgcccacugcaucgggaucacggaccgcgacuucaucgagggcguccacgggggcaccugggugagcgcgacccuggagcaggacaagugcgugaccgucauggcccccgacaagcccucccucgacaucagccuggagacgguggccaucgaccggccggccgaggugcgcaaggucugcuacaacgccgugcugacccacgugaagaucaacgacaagugccccuccaccggcgaggcgcaccucgccgaggagaacgagggggacaacgccugcaagcggaccuacagcgaccggggcugggggaacggcugcgggcuguucggcaagggcuccaucgucgccugcgccaaguucacgugcgcgaaguccaugagccuguucgagguggaccagaccaagauccaguacgucauccgcgcccagcuccacgugggggccaagcaggagaacuggaacaccgacaucaagacccugaaguucgacgcccugagcggcagccaggagguggaguucaucggguacggcaaggccacgcucgagugccagguccagaccgcgguggacuucgggaacuccuacaucgccgagauggagaccgagagcuggaucguggaccggcagugggcccaggaccugacccugcccuggcaguccggcagcggcggggucuggcgcgagaugcaccaccucguggaguucgagcccccgcacgccgccacgauccgggugcuggcgcugggcaaccaggaggggucccucaagaccgcccugaccggcgccaugcgcgucaccaaggacacgaacgacaacaaccuguacaagcuccacgggggccacgugagcugccgggugaagcuguccgcccugacccucaagggcaccagcuacaagaucugcaccgacaagauguucuucgucaagaaccccacggacaccgggcacggcaccguggugaugcaggucaagguguccaagggggcgcccugccgcaucccggugaucgucgccgacgaccugaccgccgccaucaacaagggcauccuggugaccgugaacccgaucgccagcacgaacgacgacgagguccucaucgaggugaacccgcccuucggcgacuccuacaucaucguggggcggggcgacagccgccugaccuaccaguggcacaaggagggguccagcaucggaagcacgcugggcaaggccuuuucaacaacuuugaagggagcucaaagacuggcagcguugggcgacacagccugggacuuuggcucuauuggaggggucuucaacuccauagguagagccguucaccaaguguuuggaggugccuucagaacacucuuugggggaaugucuuggaucacacaagggcuaaugggugcccuacugcucuggaugggcgucaacgcacgagaccgaucaauugcuuuggccuucuuagccacaggaggugugcucguguucuuagcgaccaaugugcacgccugaggacuagucccuguucccagagcccacuuuuuuuucuuuuuuugaaauaaaauagccugucuuucagaucuaaaaaaaaaaaaaaaaaaaaaaaaaaaaaaaaaaaaaaaaaaaaaaaaaaaaaaaaaaaaaaaaugcaucccccccccccccccccccccccccccccccaaaggcucuuuucagagccaccagaauu

SEQ ID NO: 1782 - RNA, 2347 nt, Artificial Sequence
  mRNA product Design d-1 comprising derived and/or modified sequence from YFV__NC_002031.1__SSjev(V3)-prMEdelstem_TM-JEV (polyprotein: aa122-681) (opt1)
gggagacccgugacccggaaguuguacggcuacgcgacuuucccucccacaaacccucgcgcccuuccuuuccuacuugggcccggcagaaagcuuaccaugaacgagggcagcaucauguggcuggccucccucgccguggucaucgcgugcgccggggccgugacgcuggugcggaagaaccgcuggcuccugcugaacgucaccuccgaggaccucggcaagaccuucagcguggggaccggcaacugcacgaccaacauccuggaggccaaguacuggugccccgacuccauggaguacaacugccccaaccugagcccccgggaggagcccgacgacaucgacugcuggugcuacggcguggagaacguccgcguggccuacgggaagugcgacuccgcgggccggagccgccggucccgccgggccaucgaccuccccacccacgagaaccacgggcugaagacccgccaggagaaguggaugacgggccggaugggggagcgccagcugcagaagaucgagcggugguucgugcgcaacccguucuucgccgucaccgcccucaccaucgccuaccuggugggcagcaacaugacccagcggguggucaucgcgcugcucgugcuggccgugggccccgccuacuccgcccacugcaucgggaucacggaccgcgacuucaucgagggcguccacgggggcaccugggugagcgcgacccuggagcaggacaagugcgugaccgucauggcccccgacaagcccucccucgacaucagccuggagacgguggccaucgaccggccggccgaggugcgcaaggucugcuacaacgccgugcugacccacgugaagaucaacgacaagugccccuccaccggcgaggcgcaccucgccgaggagaacgagggggacaacgccugcaagcggaccuacagcgaccggggcugggggaacggcugcgggcuguucggcaagggcuccaucgucgccugcgccaaguucacgugcgcgaaguccaugagccuguucgagguggaccagaccaagauccaguacgucauccgcgcccagcuccacgugggggccaagcaggagaacuggaacaccgacaucaagacccugaaguucgacgcccugagcggcagccaggagguggaguucaucggguacggcaaggccacgcucgagugccagguccagaccgcgguggacuucgggaacuccuacaucgccgagauggagaccgagagcuggaucguggaccggcagugggcccaggaccugacccugcccuggcaguccggcagcggcggggucuggcgcgagaugcaccaccucguggaguucgagcccccgcacgccgccacgauccgggugcuggcgcugggcaaccaggaggggucccucaagaccgcccugaccggcgccaugcgcgucaccaaggacacgaacgacaacaaccuguacaagcuccacgggggccacgugagcugccgggugaagcuguccgcccugacccucaagggcaccagcuacaagaucugcaccgacaagauguucuucgucaagaaccccacggacaccgggcacggcaccguggugaugcaggucaagguguccaagggggcgcccugccgcaucccggugaucgucgccgacgaccugaccgccgccaucaacaagggcauccuggugaccgugaacccgaucgccagcacgaacgacgacgagguccucaucgaggugaacccgcccuucggcgacuccuacaucaucguggggcggggcgacagccgccugaccuaccaguggcacaaggagggguccagcaucggcagcacccuggggaaggccuucuccaccacgcucaagggcgcccagcgccuggcggcccugggggacaccgccugggacuucggcagcaucgggggcguguucaacuccaucggccgggccguccaccagguguucgggggcgccuuccgcacccucuucgggggcaugagcuggaucacccaggggcugaugggcgcgcugcuccuguggaugggggugaacgcccgggaccgcuccaucgcccuggccuuccucgcgacgggcggcguccugguguuccuggccaccaacgugcacgccugaggacuagucccuguucccagagcccacuuuuuuuucuuuuuuugaaauaaaauagccugucuuucagaucuaaaaaaaaaaaaaaaaaaaaaaaaaaaaaaaaaaaaaaaaaaaaaaaaaaaaaaaaaaaaaaaaugcaucccccccccccccccccccccccccccccccaaaggcucuuuucagagccaccagaauu

SEQ ID NO: 1783 - RNA, 2362 nt, Artificial Sequence
  mRNA product Design d-1 comprising derived and/or modified sequence from YFV__NC_002031.1__X-SS-prME (polyprotein: aa92-778) (opt1)
gggagacccgugacccggaaguuguacggcuacgcgacuuucccucccacaaacccucgcgcccuuccuuuccuacuugggcccggcagaaagcuuaccaugcggggccugagcucccgcaagcggcgcagccacgacgugcucaccguccaguuccugauccuggggaugcuccugaugaccggcggggugacgcuggugcggaagaaccgcuggcuccugcugaacgucaccuccgaggaccucggcaagaccuucagcguggggaccggcaacugcacgaccaacauccuggaggccaaguacuggugccccgacuccauggaguacaacugccccaaccugagcccccgggaggagcccgacgacaucgacugcuggugcuacggcguggagaacguccgcguggccuacgggaagugcgacuccgcgggccggagccgccggucccgccgggccaucgaccuccccacccacgagaaccacgggcugaagacccgccaggagaaguggaugacgggccggaugggggagcgccagcugcagaagaucgagcggugguucgugcgcaacccguucuucgccgucaccgcccucaccaucgccuaccuggugggcagcaacaugacccagcggguggucaucgcgcugcucgugcuggccgugggccccgccuacuccgcccacugcaucgggaucacggaccgcgacuucaucgagggcguccacgggggcaccugggugagcgcgacccuggagcaggacaagugcgugaccgucauggcccccgacaagcccucccucgacaucagccuggagacgguggccaucgaccggccggccgaggugcgcaaggucugcuacaacgccgugcugacccacgugaagaucaacgacaagugccccuccaccggcgaggcgcaccucgccgaggagaacgagggggacaacgccugcaagcggaccuacagcgaccggggcugggggaacggcugcgggcuguucggcaagggcuccaucgucgccugcgccaaguucacgugcgcgaaguccaugagccuguucgagguggaccagaccaagauccaguacgucauccgcgcccagcuccacgugggggccaagcaggagaacuggaacaccgacaucaagacccugaaguucgacgcccugagcggcagccaggagguggaguucaucggguacggcaaggccacgcucgagugccagguccagaccgcgguggacuucgggaacuccuacaucgccgagauggagaccgagagcuggaucguggaccggcagugggcccaggaccugacccugcccuggcaguccggcagcggcggggucuggcgcgagaugcaccaccucguggaguucgagcccccgcacgccgccacgauccgggugcuggcgcugggcaaccaggaggggucccucaagaccgcccugaccggcgccaugcgcgucaccaaggacacgaacgacaacaaccuguacaagcuccacgggggccacgugagcugccgggugaagcuguccgcccugacccucaagggcaccagcuacaagaucugcaccgacaagauguucuucgucaagaaccccacggacaccgggcacggcaccguggugaugcaggucaagguguccaagggggcgcccugccgcaucccggugaucgucgccgacgaccugaccgccgccaucaacaagggcauccuggugaccgugaacccgaucgccagcacgaacgacgacgagguccucaucgaggugaacccgcccuucggcgacuccuacaucaucguggggcggggcgacagccgccugaccuaccaguggcacaaggagggguccagcaucggcaagcuguucacccagaccaugaagggggucgagcggcuggcggugaugggcgacacggccugggacuucuccagcgccggcggguucuucaccuccgugggcaaggggauccacaccgucuucggcagcgccuuccaggggcuguucggcggccucaacuggaucaccaaggugaucaugggggccgugcugaucugggucggcaucaacacgcgcaacaugaccauguccaugagcaugauccucgugggggugaucaugauguuccugagccugggcgucggggcgugaggacuagucccuguucccagagcccacuuuuuuuucuuuuuuugaaauaaaauagccugucuuucagaucuaaaaaaaaaaaaaaaaaaaaaaaaaaaaaaaaaaaaaaaaaaaaaaaaaaaaaaaaaaaaaaaaugcaucccccccccccccccccccccccccccccccaaaggcucuuuucagagccaccagaauu

SEQ ID NO: 1784 - RNA, 2365 nt, Artificial Sequence
  mRNA product Design d-1 comprising derived and/or modified sequence from YFV__NC_002031.1__SSjev(V3)-prME-XX (polyprotein: aa122-788) (opt1)
gggagacccgugacccggaaguuguacggcuacgcgacuuucccucccacaaacccucgcgcccuuccuuuccuacuugggcccggcagaaagcuuaccaugaacgagggcagcaucauguggcuggccucccucgccguggucaucgcgugcgccggggccgugacgcuggugcggaagaaccgcuggcuccugcugaacgucaccuccgaggaccucggcaagaccuucagcguggggaccggcaacugcacgaccaacauccuggaggccaaguacuggugccccgacuccauggaguacaacugccccaaccugagcccccgggaggagcccgacgacaucgacugcuggugcuacggcguggagaacguccgcguggccuacgggaagugcgacuccgcgggccggagccgccggucccgccgggccaucgaccuccccacccacgagaaccacgggcugaagacccgccaggagaaguggaugacgggccggaugggggagcgccagcugcagaagaucgagcggugguucgugcgcaacccguucuucgccgucaccgcccucaccaucgccuaccuggugggcagcaacaugacccagcggguggucaucgcgcugcucgugcuggccgugggccccgccuacuccgcccacugcaucgggaucacggaccgcgacuucaucgagggcguccacgggggcaccugggugagcgcgacccuggagcaggacaagugcgugaccgucauggcccccgacaagcccucccucgacaucagccuggagacgguggccaucgaccggccggccgaggugcgcaaggucugcuacaacgccgugcugacccacgugaagaucaacgacaagugccccuccaccggcgaggcgcaccucgccgaggagaacgagggggacaacgccugcaagcggaccuacagcgaccggggcugggggaacggcugcgggcuguucggcaagggcuccaucgucgccugcgccaaguucacgugcgcgaaguccaugagccuguucgagguggaccagaccaagauccaguacgucauccgcgcccagcuccacgugggggccaagcaggagaacuggaacaccgacaucaagacccugaaguucgacgcccugagcggcagccaggagguggaguucaucggguacggcaaggccacgcucgagugccagguccagaccgcgguggacuucgggaacuccuacaucgccgagauggagaccgagagcuggaucguggaccggcagugggcccaggaccugacccugcccuggcaguccggcagcggcggggucuggcgcgagaugcaccaccucguggaguucgagcccccgcacgccgccacgauccgggugcuggcgcugggcaaccaggaggggucccucaagaccgcccugaccggcgccaugcgcgucaccaaggacacgaacgacaacaaccuguacaagcuccacgggggccacgugagcugccgggugaagcuguccgcccugacccucaagggcaccagcuacaagaucugcaccgacaagauguucuucgucaagaaccccacggacaccgggcacggcaccguggugaugcaggucaagguguccaagggggcgcccugccgcaucccggugaucgucgccgacgaccugaccgccgccaucaacaagggcauccuggugaccgugaacccgaucgccagcacgaacgacgacgagguccucaucgaggugaacccgcccuucggcgacuccuacaucaucguggggcggggcgacagccgccugaccuaccaguggcacaaggagggguccagcaucggcaagcuguucacccagaccaugaagggggucgagcggcuggcggugaugggcgacacggccugggacuucuccagcgccggcggguucuucaccuccgugggcaaggggauccacaccgucuucggcagcgccuuccaggggcuguucggcggccucaacuggaucaccaaggugaucaugggggccgugcugaucugggucggcaucaacacgcgcaacaugaccauguccaugagcaugauccucgugggggugaucaugauguuccugagccugggcgucggggcggaccagggcugcgccaucaacuucggcaagugaggacuagucccuguucccagagcccacuuuuuuuucuuuuuuugaaauaaaauagccugucuuucagaucuaaaaaaaaaaaaaaaaaaaaaaaaaaaaaaaaaaaaaaaaaaaaaaaaaaaaaaaaaaaaaaaaugcaucccccccccccccccccccccccccccccccaaaggcucuuuucagagccaccagaauu

SEQ ID NO: 1785 - RNA, 2374 nt, Artificial Sequence
  mRNA product Design d-1 comprising derived and/or modified sequence from YFV__NC_002031.1__X-SS-prMEdelstem_TM-JEV (polyprotein: aa92-681) (opt2)
gggagacccgugacccggaaguuguacggcuacgcgacuuucccucccacaaacccucgcgcccuuccuuuccuacuugggcccggcagaaagcuuaccaugcgcggccucuccucccgcaagcgccgcucccacgacguccucaccguccaguuccucauccucggcaugcuccucaugaccggcggcgucacccucguccgcaagaaccgcuggcuccuccucaacgucaccuccgaggaccucggcaagaccuucuccgucggcaccggcaacugcaccaccaacauccucgaggccaaguacuggugccccgacuccauggaguacaacugccccaaccucuccccccgcgaggagcccgacgacaucgacugcuggugcuacggcgucgagaacguccgcgucgccuacggcaagugcgacuccgccggccgcucccgccgcucccgccgcgccaucgaccuccccacccacgagaaccacggccucaagacccgccaggagaaguggaugaccggccgcaugggcgagcgccagcuccagaagaucgagcgcugguucguccgcaaccccuucuucgccgucaccgcccucaccaucgccuaccucgucggcuccaacaugacccagcgcgucgucaucgcccuccucguccucgccgucggccccgccuacuccgcccacugcaucggcaucaccgaccgcgacuucaucgagggcguccacggcggcaccugggucuccgccacccucgagcaggacaagugcgucaccgucauggcccccgacaagcccucccucgacaucucccucgagaccgucgccaucgaccgccccgccgagguccgcaaggucugcuacaacgccguccucacccacgucaagaucaacgacaagugccccuccaccggcgaggcccaccucgccgaggagaacgagggcgacaacgccugcaagcgcaccuacuccgaccgcggcuggggcaacggcugcggccucuucggcaagggcuccaucgucgccugcgccaaguucaccugcgccaaguccaugucccucuucgaggucgaccagaccaagauccaguacgucauccgcgcccagcuccacgucggcgccaagcaggagaacuggaacaccgacaucaagacccucaaguucgacgcccucuccggcucccaggaggucgaguucaucggcuacggcaaggccacccucgagugccagguccagaccgccgucgacuucggcaacuccuacaucgccgagauggagaccgaguccuggaucgucgaccgccagugggcccaggaccucacccuccccuggcaguccggcuccggcggcgucuggcgcgagaugcaccaccucgucgaguucgagcccccccacgccgccaccauccgcguccucgcccucggcaaccaggagggcucccucaagaccgcccucaccggcgccaugcgcgucaccaaggacaccaacgacaacaaccucuacaagcuccacggcggccacgucuccugccgcgucaagcucuccgcccucacccucaagggcaccuccuacaagaucugcaccgacaagauguucuucgucaagaaccccaccgacaccggccacggcaccgucgucaugcaggucaaggucuccaagggcgcccccugccgcauccccgucaucgucgccgacgaccucaccgccgccaucaacaagggcauccucgucaccgucaaccccaucgccuccaccaacgacgacgagguccucaucgaggucaacccccccuucggcgacuccuacaucaucgucggccgcggcgacucccgccucaccuaccaguggcacaaggagggcuccuccaucggcuccacccucggcaaggccuucuccaccacccucaagggcgcccagcgccucgccgcccucggcgacaccgccugggacuucggcuccaucggcggcgucuucaacuccaucggccgcgccguccaccaggucuucggcggcgccuuccgcacccucuucggcggcauguccuggaucacccagggccucaugggcgcccuccuccucuggaugggcgucaacgcccgcgaccgcuccaucgcccucgccuuccucgccaccggcggcguccucgucuuccucgccaccaacguccacgccugaggacuagucccuguucccagagcccacuuuuuuuucuuuuuuugaaauaaaauagccugucuuucagaucuaaaaaaaaaaaaaaaaaaaaaaaaaaaaaaaaaaaaaaaaaaaaaaaaaaaaaaaaaaaaaaaaugcaucccccccccccccccccccccccccccccccaaaggcucuuuucagagccaccagaauu

SEQ ID NO: 1786 - RNA, 2347 nt, Artificial Sequence
  mRNA product Design d-1 comprising derived and/or modified sequence from YFV__NC_002031.1__SSjev(V3)-prMEdelstem_TM-JEV (polyprotein: aa122-681) (opt2)
gggagacccgugacccggaaguuguacggcuacgcgacuuucccucccacaaacccucgcgcccuuccuuuccuacuugggcccggcagaaagcuuaccaugaacgagggcuccaucauguggcucgccucccucgccgucgucaucgccugcgccggcgccgucacccucguccgcaagaaccgcuggcuccuccucaacgucaccuccgaggaccucggcaagaccuucuccgucggcaccggcaacugcaccaccaacauccucgaggccaaguacuggugccccgacuccauggaguacaacugccccaaccucuccccccgcgaggagcccgacgacaucgacugcuggugcuacggcgucgagaacguccgcgucgccuacggcaagugcgacuccgccggccgcucccgccgcucccgccgcgccaucgaccuccccacccacgagaaccacggccucaagacccgccaggagaaguggaugaccggccgcaugggcgagcgccagcuccagaagaucgagcgcugguucguccgcaaccccuucuucgccgucaccgcccucaccaucgccuaccucgucggcuccaacaugacccagcgcgucgucaucgcccuccucguccucgccgucggccccgccuacuccgcccacugcaucggcaucaccgaccgcgacuucaucgagggcguccacggcggcaccugggucuccgccacccucgagcaggacaagugcgucaccgucauggcccccgacaagcccucccucgacaucucccucgagaccgucgccaucgaccgccccgccgagguccgcaaggucugcuacaacgccguccucacccacgucaagaucaacgacaagugccccuccaccggcgaggcccaccucgccgaggagaacgagggcgacaacgccugcaagcgcaccuacuccgaccgcggcuggggcaacggcugcggccucuucggcaagggcuccaucgucgccugcgccaaguucaccugcgccaaguccaugucccucuucgaggucgaccagaccaagauccaguacgucauccgcgcccagcuccacgucggcgccaagcaggagaacuggaacaccgacaucaagacccucaaguucgacgcccucuccggcucccaggaggucgaguucaucggcuacggcaaggccacccucgagugccagguccagaccgccgucgacuucggcaacuccuacaucgccgagauggagaccgaguccuggaucgucgaccgccagugggcccaggaccucacccuccccuggcaguccggcuccggcggcgucuggcgcgagaugcaccaccucgucgaguucgagcccccccacgccgccaccauccgcguccucgcccucggcaaccaggagggcucccucaagaccgcccucaccggcgccaugcgcgucaccaaggacaccaacgacaacaaccucuacaagcuccacggcggccacgucuccugccgcgucaagcucuccgcccucacccucaagggcaccuccuacaagaucugcaccgacaagauguucuucgucaagaaccccaccgacaccggccacggcaccgucgucaugcaggucaaggucuccaagggcgcccccugccgcauccccgucaucgucgccgacgaccucaccgccgccaucaacaagggcauccucgucaccgucaaccccaucgccuccaccaacgacgacgagguccucaucgaggucaacccccccuucggcgacuccuacaucaucgucggccgcggcgacucccgccucaccuaccaguggcacaaggagggcuccuccaucggcuccacccucggcaaggccuucuccaccacccucaagggcgcccagcgccucgccgcccucggcgacaccgccugggacuucggcuccaucggcggcgucuucaacuccaucggccgcgccguccaccaggucuucggcggcgccuuccgcacccucuucggcggcauguccuggaucacccagggccucaugggcgcccuccuccucuggaugggcgucaacgcccgcgaccgcuccaucgcccucgccuuccucgccaccggcggcguccucgucuuccucgccaccaacguccacgccugaggacuagucccuguucccagagcccacuuuuuuuucuuuuuuugaaauaaaauagccugucuuucagaucuaaaaaaaaaaaaaaaaaaaaaaaaaaaaaaaaaaaaaaaaaaaaaaaaaaaaaaaaaaaaaaaaugcaucccccccccccccccccccccccccccccccaaaggcucuuuucagagccaccagaauu

SEQ ID NO: 1787 - RNA, 2362 nt, Artificial Sequence
  mRNA product Design d-1 comprising derived and/or modified sequence from YFV__NC_002031.1__X-SS-prME (polyprotein: aa92-778) (opt2)
gggagacccgugacccggaaguuguacggcuacgcgacuuucccucccacaaacccucgcgcccuuccuuuccuacuugggcccggcagaaagcuuaccaugcgcggccucuccucccgcaagcgccgcucccacgacguccucaccguccaguuccucauccucggcaugcuccucaugaccggcggcgucacccucguccgcaagaaccgcuggcuccuccucaacgucaccuccgaggaccucggcaagaccuucuccgucggcaccggcaacugcaccaccaacauccucgaggccaaguacuggugccccgacuccauggaguacaacugccccaaccucuccccccgcgaggagcccgacgacaucgacugcuggugcuacggcgucgagaacguccgcgucgccuacggcaagugcgacuccgccggccgcucccgccgcucccgccgcgccaucgaccuccccacccacgagaaccacggccucaagacccgccaggagaaguggaugaccggccgcaugggcgagcgccagcuccagaagaucgagcgcugguucguccgcaaccccuucuucgccgucaccgcccucaccaucgccuaccucgucggcuccaacaugacccagcgcgucgucaucgcccuccucguccucgccgucggccccgccuacuccgcccacugcaucggcaucaccgaccgcgacuucaucgagggcguccacggcggcaccugggucuccgccacccucgagcaggacaagugcgucaccgucauggcccccgacaagcccucccucgacaucucccucgagaccgucgccaucgaccgccccgccgagguccgcaaggucugcuacaacgccguccucacccacgucaagaucaacgacaagugccccuccaccggcgaggcccaccucgccgaggagaacgagggcgacaacgccugcaagcgcaccuacuccgaccgcggcuggggcaacggcugcggccucuucggcaagggcuccaucgucgccugcgccaaguucaccugcgccaaguccaugucccucuucgaggucgaccagaccaagauccaguacgucauccgcgcccagcuccacgucggcgccaagcaggagaacuggaacaccgacaucaagacccucaaguucgacgcccucuccggcucccaggaggucgaguucaucggcuacggcaaggccacccucgagugccagguccagaccgccgucgacuucggcaacuccuacaucgccgagauggagaccgaguccuggaucgucgaccgccagugggcccaggaccucacccuccccuggcaguccggcuccggcggcgucuggcgcgagaugcaccaccucgucgaguucgagcccccccacgccgccaccauccgcguccucgcccucggcaaccaggagggcucccucaagaccgcccucaccggcgccaugcgcgucaccaaggacaccaacgacaacaaccucuacaagcuccacggcggccacgucuccugccgcgucaagcucuccgcccucacccucaagggcaccuccuacaagaucugcaccgacaagauguucuucgucaagaaccccaccgacaccggccacggcaccgucgucaugcaggucaaggucuccaagggcgcccccugccgcauccccgucaucgucgccgacgaccucaccgccgccaucaacaagggcauccucgucaccgucaaccccaucgccuccaccaacgacgacgagguccucaucgaggucaacccccccuucggcgacuccuacaucaucgucggccgcggcgacucccgccucaccuaccaguggcacaaggagggcuccuccaucggcaagcucuucacccagaccaugaagggcgucgagcgccucgccgucaugggcgacaccgccugggacuucuccuccgccggcggcuucuucaccuccgucggcaagggcauccacaccgucuucggcuccgccuuccagggccucuucggcggccucaacuggaucaccaaggucaucaugggcgccguccucaucugggucggcaucaacacccgcaacaugaccauguccauguccaugauccucgucggcgucaucaugauguuccucucccucggcgucggcgccugaggacuagucccuguucccagagcccacuuuuuuuucuuuuuuugaaauaaaauagccugucuuucagaucuaaaaaaaaaaaaaaaaaaaaaaaaaaaaaaaaaaaaaaaaaaaaaaaaaaaaaaaaaaaaaaaaugcaucccccccccccccccccccccccccccccccaaaggcucuuuucagagccaccagaauu

SEQ ID NO: 1788 - RNA, 2365 nt, Artificial Sequence
  mRNA product Design d-1 comprising derived and/or modified sequence from YFV__NC_002031.1__SSjev(V3)-prME-XX (polyprotein: aa122-788) (opt2)
gggagacccgugacccggaaguuguacggcuacgcgacuuucccucccacaaacccucgcgcccuuccuuuccuacuugggcccggcagaaagcuuaccaugaacgagggcuccaucauguggcucgccucccucgccgucgucaucgccugcgccggcgccgucacccucguccgcaagaaccgcuggcuccuccucaacgucaccuccgaggaccucggcaagaccuucuccgucggcaccggcaacugcaccaccaacauccucgaggccaaguacuggugccccgacuccauggaguacaacugccccaaccucuccccccgcgaggagcccgacgacaucgacugcuggugcuacggcgucgagaacguccgcgucgccuacggcaagugcgacuccgccggccgcucccgccgcucccgccgcgccaucgaccuccccacccacgagaaccacggccucaagacccgccaggagaaguggaugaccggccgcaugggcgagcgccagcuccagaagaucgagcgcugguucguccgcaaccccuucuucgccgucaccgcccucaccaucgccuaccucgucggcuccaacaugacccagcgcgucgucaucgcccuccucguccucgccgucggccccgccuacuccgcccacugcaucggcaucaccgaccgcgacuucaucgagggcguccacggcggcaccugggucuccgccacccucgagcaggacaagugcgucaccgucauggcccccgacaagcccucccucgacaucucccucgagaccgucgccaucgaccgccccgccgagguccgcaaggucugcuacaacgccguccucacccacgucaagaucaacgacaagugccccuccaccggcgaggcccaccucgccgaggagaacgagggcgacaacgccugcaagcgcaccuacuccgaccgcggcuggggcaacggcugcggccucuucggcaagggcuccaucgucgccugcgccaaguucaccugcgccaaguccaugucccucuucgaggucgaccagaccaagauccaguacgucauccgcgcccagcuccacgucggcgccaagcaggagaacuggaacaccgacaucaagacccucaaguucgacgcccucuccggcucccaggaggucgaguucaucggcuacggcaaggccacccucgagugccagguccagaccgccgucgacuucggcaacuccuacaucgccgagauggagaccgaguccuggaucgucgaccgccagugggcccaggaccucacccuccccuggcaguccggcuccggcggcgucuggcgcgagaugcaccaccucgucgaguucgagcccccccacgccgccaccauccgcguccucgcccucggcaaccaggagggcucccucaagaccgcccucaccggcgccaugcgcgucaccaaggacaccaacgacaacaaccucuacaagcuccacggcggccacgucuccugccgcgucaagcucuccgcccucacccucaagggcaccuccuacaagaucugcaccgacaagauguucuucgucaagaaccccaccgacaccggccacggcaccgucgucaugcaggucaaggucuccaagggcgcccccugccgcauccccgucaucgucgccgacgaccucaccgccgccaucaacaagggcauccucgucaccgucaaccccaucgccuccaccaacgacgacgagguccucaucgaggucaacccccccuucggcgacuccuacaucaucgucggccgcggcgacucccgccucaccuaccaguggcacaaggagggcuccuccaucggcaagcucuucacccagaccaugaagggcgucgagcgccucgccgucaugggcgacaccgccugggacuucuccuccgccggcggcuucuucaccuccgucggcaagggcauccacaccgucuucggcuccgccuuccagggccucuucggcggccucaacuggaucaccaaggucaucaugggcgccguccucaucugggucggcaucaacacccgcaacaugaccauguccauguccaugauccucgucggcgucaucaugauguuccucucccucggcgucggcgccgaccagggcugcgccaucaacuucggcaagugaggacuagucccuguucccagagcccacuuuuuuuucuuuuuuugaaauaaaauagccugucuuucagaucuaaaaaaaaaaaaaaaaaaaaaaaaaaaaaaaaaaaaaaaaaaaaaaaaaaaaaaaaaaaaaaaaugcaucccccccccccccccccccccccccccccccaaaggcucuuuucagagccaccagaauu

SEQ ID NO: 1789 - RNA, 2374 nt, Artificial Sequence
  mRNA product Design d-1 comprising derived and/or modified sequence from YFV__NC_002031.1__X-SS-prMEdelstem_TM-JEV (polyprotein: aa92-681) (opt3)
gggagacccgugacccggaaguuguacggcuacgcgacuuucccucccacaaacccucgcgcccuuccuuuccuacuugggcccggcagaaagcuuaccaugagaggccugagcuccaggaagcggcgcucucacgacgugcucaccguccaguuccuuauccuggggauguuguuaaugacaggagguguuacucuggugcguaaaaaccgauggcuacuccugaauguaacgucagaggaucuuggcaagaccuuuaguguggggacaggaaacugcacuaccaauauucuggaagccaaauacuggugucccgacagcauggaguauaacugcccuaauuuguccccaagagaggaaccggaugacauagauuguuggugcuacggcgucgaaaacgugaggguugcuuaugguaagugugacucugcagggcggucgcgcagaucaaggcgggccaucgaucuccccacacaugagaaucacggacugaaaacccgccaagagaaguggaugacuggccgaaugggcgaaagacagcugcagaagauugagaggugguucgugcggaacccuuucuucgcggucacagcucucaccaucgccuacuuaguggggagcaauaugacgcagcguguaguuauugcacugcuuguguuggccgucggaccagcuuauagugcacauugcaucgguauaacugaccgcgauuuuaucgaaggcgugcacgggggaaccuggguguccgccacacuggagcaagacaaaugugucacuguuauggcucccgauaagccuucucuagacauuagccucgagaccguggccaucgauagaccagcggaaguaaggaaagugugcuacaacgcaguccugacacaugugaagauuaaugacaaaugucccuccaccggcgaggcccaccuugcugaagagaacgaaggugacaaugccugcaagcggacguauucagaucgaggguggggaaacggcuguggccuguucgggaagggaaguaucguugcaugcgcuaaauuuacuugcgccaagagcaugucuuuguucgagguggaccagacaaaaauacaguacgucauucgcgcgcagcuccacgugggugccaagcaagagaauuggaacaccgauaucaaaacucugaaguuugacgcauuauccggcucacaggaaguagaguucauuggguacggaaaagcuacacuggaaugucagguucagaccgccguggauuuuggcaacagcuauaucgcugagauggaaacggagaguuggaucgucgacagacaaugggcccaggaucucacccuuccuuggcagucugguuccgggggcguguggagggagaugcaucaccuggucgaauuugagccaccgcaugcagccacaauucggguguuggcucuaggaaaucaagaaggcagccugaagacugcgcucaccggggcaaugcgcguuacaaaggacacuaacgauaauaaccuguacaaacuucacggaggucacgugucgugcagaguaaagcugucugccuugacccucaaaggcacauccuauaagauauguaccgacaaaauguuuuucgucaagaaucccacugauacggggcauggaacagugguuaugcaagugaaggucucaaaaggcgcuccuugcaggaucccagugauuguagccgacgaccugaccgcagccaucaacaaggguauauuagugacuguuaaucccauugcuaguaccaacgaugacgagguccugaucgaagugaauccuccauucggggauagcuacaucauugugggccguggagacucccggcuaacauaucaguggcacaaagagggcucuagcaucggcagcacccuggggaaggccuucuccacaacucucaaaggagcucagagacuugcagcccugggugacacggcgugggauuuuggcucuaucgggggaguguucaacucaauuggcagggcuguccaccaaguuuuugguggggccuuccggaccuuguuuggaggcaugaguuggauaacacagggcuuaaugggggcacugcuacucuggaugggagugaaugcccgcgaccgaagcaucgcucuggcauuccuugccacugguggcguacugguguuuuuggcuaccaacguccaugccugaggacuagucccuguucccagagcccacuuuuuuuucuuuuuuugaaauaaaauagccugucuuucagaucuaaaaaaaaaaaaaaaaaaaaaaaaaaaaaaaaaaaaaaaaaaaaaaaaaaaaaaaaaaaaaaaaugcaucccccccccccccccccccccccccccccccaaaggcucuuuucagagccaccagaauu

SEQ ID NO: 1790 - RNA, 2347 nt, Artificial Sequence
  mRNA product Design d-1 comprising derived and/or modified sequence from YFV__NC_002031.1__SSjev(V3)-prMEdelstem_TM-JEV (polyprotein: aa122-681) (opt3)
gggagacccgugacccggaaguuguacggcuacgcgacuuucccucccacaaacccucgcgcccuuccuuuccuacuugggcccggcagaaagcuuaccaugaacgagggcagcaucauguggcuggccucccucgcuguggucauugcaugcgccggggcgguuacucuggugcguaaaaaccgauggcuacuccugaauguaacgucagaggaucuuggcaagaccuuuaguguggggacaggaaacugcacuaccaauauucuggaagccaaauacuggugucccgacagcauggaguauaacugcccuaauuuguccccaagagaggaaccggaugacauagauuguuggugcuacggcgucgaaaacgugaggguugcuuaugguaagugugacucugcagggcggucgcgcagaucaaggcgggccaucgaucuccccacacaugagaaucacggacugaaaacccgccaagagaaguggaugacuggccgaaugggcgaaagacagcugcagaagauugagaggugguucgugcggaacccuuucuucgcggucacagcucucaccaucgccuacuuaguggggagcaauaugacgcagcguguaguuauugcacugcuuguguuggccgucggaccagcuuauagugcacauugcaucgguauaacugaccgcgauuuuaucgaaggcgugcacgggggaaccuggguguccgccacacuggagcaagacaaaugugucacuguuauggcucccgauaagccuucucuagacauuagccucgagaccguggccaucgauagaccagcggaaguaaggaaagugugcuacaacgcaguccugacacaugugaagauuaaugacaaaugucccuccaccggcgaggcccaccuugcugaagagaacgaaggugacaaugccugcaagcggacguauucagaucgaggguggggaaacggcuguggccuguucgggaagggaaguaucguugcaugcgcuaaauuuacuugcgccaagagcaugucuuuguucgagguggaccagacaaaaauacaguacgucauucgcgcgcagcuccacgugggugccaagcaagagaauuggaacaccgauaucaaaacucugaaguuugacgcauuauccggcucacaggaaguagaguucauuggguacggaaaagcuacacuggaaugucagguucagaccgccguggauuuuggcaacagcuauaucgcugagauggaaacggagaguuggaucgucgacagacaaugggcccaggaucucacccuuccuuggcagucugguuccgggggcguguggagggagaugcaucaccuggucgaauuugagccaccgcaugcagccacaauucggguguuggcucuaggaaaucaagaaggcagccugaagacugcgcucaccggggcaaugcgcguuacaaaggacacuaacgauaauaaccuguacaaacuucacggaggucacgugucgugcagaguaaagcugucugccuugacccucaaaggcacauccuauaagauauguaccgacaaaauguuuuucgucaagaaucccacugauacggggcauggaacagugguuaugcaagugaaggucucaaaaggcgcuccuugcaggaucccagugauuguagccgacgaccugaccgcagccaucaacaaggguauauuagugacuguuaaucccauugcuaguaccaacgaugacgagguccugaucgaagugaauccuccauucggggauagcuacaucauugugggccguggagacucccggcuaacauaucaguggcacaaagagggcucuagcaucggcagcacccuggggaaggccuucuccacaacucucaaaggagcucagagacuugcagcccugggugacacggcgugggauuuuggcucuaucgggggaguguucaacucaauuggcagggcuguccaccaaguuuuugguggggccuuccggaccuuguuuggaggcaugaguuggauaacacagggcuuaaugggggcacugcuacucuggaugggagugaaugcccgcgaccgaagcaucgcucuggcauuccuugccacugguggcguacugguguuuuuggcuaccaacguccaugccugaggacuagucccuguucccagagcccacuuuuuuuucuuuuuuugaaauaaaauagccugucuuucagaucuaaaaaaaaaaaaaaaaaaaaaaaaaaaaaaaaaaaaaaaaaaaaaaaaaaaaaaaaaaaaaaaaugcaucccccccccccccccccccccccccccccccaaaggcucuuuucagagccaccagaauu

SEQ ID NO: 1791 - RNA, 2362 nt, Artificial Sequence
  mRNA product Design d-1 comprising derived and/or modified sequence from YFV__NC_002031.1__X-SS-prME (polyprotein: aa92-778) (opt3)
gggagacccgugacccggaaguuguacggcuacgcgacuuucccucccacaaacccucgcgcccuuccuuuccuacuugggcccggcagaaagcuuaccaugagaggccugagcuccaggaagcggcgcucucacgacgugcucaccguccaguuccuuauccuggggauguuguuaaugacaggagguguuacucuggugcguaaaaaccgauggcuacuccugaauguaacgucagaggaucuuggcaagaccuuuaguguggggacaggaaacugcacuaccaauauucuggaagccaaauacuggugucccgacagcauggaguauaacugcccuaauuuguccccaagagaggaaccggaugacauagauuguuggugcuacggcgucgaaaacgugaggguugcuuaugguaagugugacucugcagggcggucgcgcagaucaaggcgggccaucgaucuccccacacaugagaaucacggacugaaaacccgccaagagaaguggaugacuggccgaaugggcgaaagacagcugcagaagauugagaggugguucgugcggaacccuuucuucgcggucacagcucucaccaucgccuacuuaguggggagcaauaugacgcagcguguaguuauugcacugcuuguguuggccgucggaccagcuuauagugcacauugcaucgguauaacugaccgcgauuuuaucgaaggcgugcacgggggaaccuggguguccgccacacuggagcaagacaaaugugucacuguuauggcucccgauaagccuucucuagacauuagccucgagaccguggccaucgauagaccagcggaaguaaggaaagugugcuacaacgcaguccugacacaugugaagauuaaugacaaaugucccuccaccggcgaggcccaccuugcugaagagaacgaaggugacaaugccugcaagcggacguauucagaucgaggguggggaaacggcuguggccuguucgggaagggaaguaucguugcaugcgcuaaauuuacuugcgccaagagcaugucuuuguucgagguggaccagacaaaaauacaguacgucauucgcgcgcagcuccacgugggugccaagcaagagaauuggaacaccgauaucaaaacucugaaguuugacgcauuauccggcucacaggaaguagaguucauuggguacggaaaagcuacacuggaaugucagguucagaccgccguggauuuuggcaacagcuauaucgcugagauggaaacggagaguuggaucgucgacagacaaugggcccaggaucucacccuuccuuggcagucugguuccgggggcguguggagggagaugcaucaccuggucgaauuugagccaccgcaugcagccacaauucggguguuggcucuaggaaaucaagaaggcagccugaagacugcgcucaccggggcaaugcgcguuacaaaggacacuaacgauaauaaccuguacaaacuucacggaggucacgugucgugcagaguaaagcugucugccuugacccucaaaggcacauccuauaagauauguaccgacaaaauguuuuucgucaagaaucccacugauacggggcauggaacagugguuaugcaagugaaggucucaaaaggcgcuccuugcaggaucccagugauuguagccgacgaccugaccgcagccaucaacaaggguauauuagugacuguuaaucccauugcuaguaccaacgaugacgagguccugaucgaagugaauccuccauucggggauagcuacaucauugugggccguggagacucccggcuaacauaucaguggcacaaagagggcucuagcaucgggaagcucuuuacccagacuaugaaaggagucgagcgacuggccguuaugggugauacagcaugggacuucucaagugcgggcggguuuuucacguccgugggaaagggcauucauaccguguuugguagcgcuuuccaggggcuuuuuggcggauugaacuggauaacuaagguaaucaugggcgccguccugauuuggguggggaucaauacaagaaacaugaccaugucuaugucaaugauccucguuggagugauuaugauguuccugagucuuggcgucggugcaugaggacuagucccuguucccagagcccacuuuuuuuucuuuuuuugaaauaaaauagccugucuuucagaucuaaaaaaaaaaaaaaaaaaaaaaaaaaaaaaaaaaaaaaaaaaaaaaaaaaaaaaaaaaaaaaaaugcaucccccccccccccccccccccccccccccccaaaggcucuuuucagagccaccagaauu

SEQ ID NO: 1792 - RNA, 2365 nt, Artificial Sequence
  mRNA product Design d-1 comprising derived and/or modified sequence from YFV__NC_002031.1__SSjev(V3)-prME-XX (polyprotein: aa122-788) (opt3)
gggagacccgugacccggaaguuguacggcuacgcgacuuucccucccacaaacccucgcgcccuuccuuuccuacuugggcccggcagaaagcuuaccaugaacgagggcagcaucauguggcuggccucccucgcuguggucauugcaugcgccggggcgguuacucuggugcguaaaaaccgauggcuacuccugaauguaacgucagaggaucuuggcaagaccuuuaguguggggacaggaaacugcacuaccaauauucuggaagccaaauacuggugucccgacagcauggaguauaacugcccuaauuuguccccaagagaggaaccggaugacauagauuguuggugcuacggcgucgaaaacgugaggguugcuuaugguaagugugacucugcagggcggucgcgcagaucaaggcgggccaucgaucuccccacacaugagaaucacggacugaaaacccgccaagagaaguggaugacuggccgaaugggcgaaagacagcugcagaagauugagaggugguucgugcggaacccuuucuucgcggucacagcucucaccaucgccuacuuaguggggagcaauaugacgcagcguguaguuauugcacugcuuguguuggccgucggaccagcuuauagugcacauugcaucgguauaacugaccgcgauuuuaucgaaggcgugcacgggggaaccuggguguccgccacacuggagcaagacaaaugugucacuguuauggcucccgauaagccuucucuagacauuagccucgagaccguggccaucgauagaccagcggaaguaaggaaagugugcuacaacgcaguccugacacaugugaagauuaaugacaaaugucccuccaccggcgaggcccaccuugcugaagagaacgaaggugacaaugccugcaagcggacguauucagaucgaggguggggaaacggcuguggccuguucgggaagggaaguaucguugcaugcgcuaaauuuacuugcgccaagagcaugucuuuguucgagguggaccagacaaaaauacaguacgucauucgcgcgcagcuccacgugggugccaagcaagagaauuggaacaccgauaucaaaacucugaaguuugacgcauuauccggcucacaggaaguagaguucauuggguacggaaaagcuacacuggaaugucagguucagaccgccguggauuuuggcaacagcuauaucgcugagauggaaacggagaguuggaucgucgacagacaaugggcccaggaucucacccuuccuuggcagucugguuccgggggcguguggagggagaugcaucaccuggucgaauuugagccaccgcaugcagccacaauucggguguuggcucuaggaaaucaagaaggcagccugaagacugcgcucaccggggcaaugcgcguuacaaaggacacuaacgauaauaaccuguacaaacuucacggaggucacgugucgugcagaguaaagcugucugccuugacccucaaaggcacauccuauaagauauguaccgacaaaauguuuuucgucaagaaucccacugauacggggcauggaacagugguuaugcaagugaaggucucaaaaggcgcuccuugcaggaucccagugauuguagccgacgaccugaccgcagccaucaacaaggguauauuagugacuguuaaucccauugcuaguaccaacgaugacgagguccugaucgaagugaauccuccauucggggauagcuacaucauugugggccguggagacucccggcuaacauaucaguggcacaaagagggcucuagcaucgggaagcucuuuacccagacuaugaaaggagucgagcgacuggccguuaugggugauacagcaugggacuucucaagugcgggcggguuuuucacguccgugggaaagggcauucauaccguguuugguagcgcuuuccaggggcuuuuuggcggauugaacuggauaacuaagguaaucaugggcgccguccugauuuggguggggaucaauacaagaaacaugaccaugucuaugucaaugauccucguuggagugauuaugauguuccugagucuuggcgucggugcagaucaggggugugccauaaauuuuggaaaaugaggacuagucccuguucccagagcccacuuuuuuuucuuuuuuugaaauaaaauagccugucuuucagaucuaaaaaaaaaaaaaaaaaaaaaaaaaaaaaaaaaaaaaaaaaaaaaaaaaaaaaaaaaaaaaaaaugcaucccccccccccccccccccccccccccccccaaaggcucuuuucagagccaccagaauu

SEQ ID NO: 1793 - RNA, 2374 nt, Artificial Sequence
  mRNA product Design d-1 comprising derived and/or modified sequence from YFV__NC_002031.1__X-SS-prMEdelstem_TM-JEV (polyprotein: aa92-681) (opt4)
gggagacccgugacccggaaguuguacggcuacgcgacuuucccucccacaaacccucgcgcccuuccuuuccuacuugggcccggcagaaagcuuaccaugagaggccugagcagcagaaagagaagaagccacgacgugcugaccgugcaguuccugauccugggcaugcugcugaugaccggcggcgugacccuggugagaaagaacagauggcugcugcugaacgugaccagcgaggaccugggcaagaccuucagcgugggcaccggcaacugcaccaccaacauccuggaggccaaguacuggugccccgacagcauggaguacaacugccccaaccugagccccagagaggagcccgacgacaucgacugcuggugcuacggcguggagaacgugagaguggccuacggcaagugcgacagcgccggcagaagcagaagaagcagaagagccaucgaccugcccacccacgagaaccacggccugaagaccagacaggagaaguggaugaccggcagaaugggcgagagacagcugcagaagaucgagagaugguucgugagaaaccccuucuucgccgugaccgcccugaccaucgccuaccuggugggcagcaacaugacccagagaguggugaucgcccugcuggugcuggccgugggccccgccuacagcgcccacugcaucggcaucaccgacagagacuucaucgagggcgugcacggcggcaccugggugagcgccacccuggagcaggacaagugcgugaccgugauggcccccgacaagcccagccuggacaucagccuggagaccguggccaucgacagacccgccgaggugagaaaggugugcuacaacgccgugcugacccacgugaagaucaacgacaagugccccagcaccggcgaggcccaccuggccgaggagaacgagggcgacaacgccugcaagagaaccuacagcgacagaggcuggggcaacggcugcggccuguucggcaagggcagcaucguggccugcgccaaguucaccugcgccaagagcaugagccuguucgagguggaccagaccaagauccaguacgugaucagagcccagcugcacgugggcgccaagcaggagaacuggaacaccgacaucaagacccugaaguucgacgcccugagcggcagccaggagguggaguucaucggcuacggcaaggccacccuggagugccaggugcagaccgccguggacuucggcaacagcuacaucgccgagauggagaccgagagcuggaucguggacagacagugggcccaggaccugacccugcccuggcagagcggcagcggcggcguguggagagagaugcaccaccugguggaguucgagcccccccacgccgccaccaucagagugcuggcccugggcaaccaggagggcagccugaagaccgcccugaccggcgccaugagagugaccaaggacaccaacgacaacaaccuguacaagcugcacggcggccacgugagcugcagagugaagcugagcgcccugacccugaagggcaccagcuacaagaucugcaccgacaagauguucuucgugaagaaccccaccgacaccggccacggcaccguggugaugcaggugaaggugagcaagggcgcccccugcagaauccccgugaucguggccgacgaccugaccgccgccaucaacaagggcauccuggugaccgugaaccccaucgccagcaccaacgacgacgaggugcugaucgaggugaacccccccuucggcgacagcuacaucaucgugggcagaggcgacagcagacugaccuaccaguggcacaaggagggcagcagcaucggcagcacccugggcaaggccuucagcaccacccugaagggcgcccagagacuggccgcccugggcgacaccgccugggacuucggcagcaucggcggcguguucaacagcaucggcagagccgugcaccagguguucggcggcgccuucagaacccuguucggcggcaugagcuggaucacccagggccugaugggcgcccugcugcuguggaugggcgugaacgccagagacagaagcaucgcccuggccuuccuggccaccggcggcgugcugguguuccuggccaccaacgugcacgccugaggacuagucccuguucccagagcccacuuuuuuuucuuuuuuugaaauaaaauagccugucuuucagaucuaaaaaaaaaaaaaaaaaaaaaaaaaaaaaaaaaaaaaaaaaaaaaaaaaaaaaaaaaaaaaaaaugcaucccccccccccccccccccccccccccccccaaaggcucuuuucagagccaccagaauu

SEQ ID NO: 1794 - RNA, 2347 nt, Artificial Sequence
  mRNA product Design d-1 comprising derived and/or modified sequence from YFV__NC_002031.1__SSjev(V3)-prMEdelstem_TM-JEV (polyprotein: aa122-681) (opt4)
gggagacccgugacccggaaguuguacggcuacgcgacuuucccucccacaaacccucgcgcccuuccuuuccuacuugggcccggcagaaagcuuaccaugaacgagggcagcaucauguggcuggccagccuggccguggugaucgccugcgccggcgccgugacccuggugagaaagaacagauggcugcugcugaacgugaccagcgaggaccugggcaagaccuucagcgugggcaccggcaacugcaccaccaacauccuggaggccaaguacuggugccccgacagcauggaguacaacugccccaaccugagccccagagaggagcccgacgacaucgacugcuggugcuacggcguggagaacgugagaguggccuacggcaagugcgacagcgccggcagaagcagaagaagcagaagagccaucgaccugcccacccacgagaaccacggccugaagaccagacaggagaaguggaugaccggcagaaugggcgagagacagcugcagaagaucgagagaugguucgugagaaaccccuucuucgccgugaccgcccugaccaucgccuaccuggugggcagcaacaugacccagagaguggugaucgcccugcuggugcuggccgugggccccgccuacagcgcccacugcaucggcaucaccgacagagacuucaucgagggcgugcacggcggcaccugggugagcgccacccuggagcaggacaagugcgugaccgugauggcccccgacaagcccagccuggacaucagccuggagaccguggccaucgacagacccgccgaggugagaaaggugugcuacaacgccgugcugacccacgugaagaucaacgacaagugccccagcaccggcgaggcccaccuggccgaggagaacgagggcgacaacgccugcaagagaaccuacagcgacagaggcuggggcaacggcugcggccuguucggcaagggcagcaucguggccugcgccaaguucaccugcgccaagagcaugagccuguucgagguggaccagaccaagauccaguacgugaucagagcccagcugcacgugggcgccaagcaggagaacuggaacaccgacaucaagacccugaaguucgacgcccugagcggcagccaggagguggaguucaucggcuacggcaaggccacccuggagugccaggugcagaccgccguggacuucggcaacagcuacaucgccgagauggagaccgagagcuggaucguggacagacagugggcccaggaccugacccugcccuggcagagcggcagcggcggcguguggagagagaugcaccaccugguggaguucgagcccccccacgccgccaccaucagagugcuggcccugggcaaccaggagggcagccugaagaccgcccugaccggcgccaugagagugaccaaggacaccaacgacaacaaccuguacaagcugcacggcggccacgugagcugcagagugaagcugagcgcccugacccugaagggcaccagcuacaagaucugcaccgacaagauguucuucgugaagaaccccaccgacaccggccacggcaccguggugaugcaggugaaggugagcaagggcgcccccugcagaauccccgugaucguggccgacgaccugaccgccgccaucaacaagggcauccuggugaccgugaaccccaucgccagcaccaacgacgacgaggugcugaucgaggugaacccccccuucggcgacagcuacaucaucgugggcagaggcgacagcagacugaccuaccaguggcacaaggagggcagcagcaucggcagcacccugggcaaggccuucagcaccacccugaagggcgcccagagacuggccgcccugggcgacaccgccugggacuucggcagcaucggcggcguguucaacagcaucggcagagccgugcaccagguguucggcggcgccuucagaacccuguucggcggcaugagcuggaucacccagggccugaugggcgcccugcugcuguggaugggcgugaacgccagagacagaagcaucgcccuggccuuccuggccaccggcggcgugcugguguuccuggccaccaacgugcacgccugaggacuagucccuguucccagagcccacuuuuuuuucuuuuuuugaaauaaaauagccugucuuucagaucuaaaaaaaaaaaaaaaaaaaaaaaaaaaaaaaaaaaaaaaaaaaaaaaaaaaaaaaaaaaaaaaaugcaucccccccccccccccccccccccccccccccaaaggcucuuuucagagccaccagaauu

SEQ ID NO: 1795 - RNA, 2362 nt, Artificial Sequence
  mRNA product Design d-1 comprising derived and/or modified sequence from YFV__NC_002031.1__X-SS-prME (polyprotein: aa92-778) (opt4)
gggagacccgugacccggaaguuguacggcuacgcgacuuucccucccacaaacccucgcgcccuuccuuuccuacuugggcccggcagaaagcuuaccaugagaggccugagcagcagaaagagaagaagccacgacgugcugaccgugcaguuccugauccugggcaugcugcugaugaccggcggcgugacccuggugagaaagaacagauggcugcugcugaacgugaccagcgaggaccugggcaagaccuucagcgugggcaccggcaacugcaccaccaacauccuggaggccaaguacuggugccccgacagcauggaguacaacugccccaaccugagccccagagaggagcccgacgacaucgacugcuggugcuacggcguggagaacgugagaguggccuacggcaagugcgacagcgccggcagaagcagaagaagcagaagagccaucgaccugcccacccacgagaaccacggccugaagaccagacaggagaaguggaugaccggcagaaugggcgagagacagcugcagaagaucgagagaugguucgugagaaaccccuucuucgccgugaccgcccugaccaucgccuaccuggugggcagcaacaugacccagagaguggugaucgcccugcuggugcuggccgugggccccgccuacagcgcccacugcaucggcaucaccgacagagacuucaucgagggcgugcacggcggcaccugggugagcgccacccuggagcaggacaagugcgugaccgugauggcccccgacaagcccagccuggacaucagccuggagaccguggccaucgacagacccgccgaggugagaaaggugugcuacaacgccgugcugacccacgugaagaucaacgacaagugccccagcaccggcgaggcccaccuggccgaggagaacgagggcgacaacgccugcaagagaaccuacagcgacagaggcuggggcaacggcugcggccuguucggcaagggcagcaucguggccugcgccaaguucaccugcgccaagagcaugagccuguucgagguggaccagaccaagauccaguacgugaucagagcccagcugcacgugggcgccaagcaggagaacuggaacaccgacaucaagacccugaaguucgacgcccugagcggcagccaggagguggaguucaucggcuacggcaaggccacccuggagugccaggugcagaccgccguggacuucggcaacagcuacaucgccgagauggagaccgagagcuggaucguggacagacagugggcccaggaccugacccugcccuggcagagcggcagcggcggcguguggagagagaugcaccaccugguggaguucgagcccccccacgccgccaccaucagagugcuggcccugggcaaccaggagggcagccugaagaccgcccugaccggcgccaugagagugaccaaggacaccaacgacaacaaccuguacaagcugcacggcggccacgugagcugcagagugaagcugagcgcccugacccugaagggcaccagcuacaagaucugcaccgacaagauguucuucgugaagaaccccaccgacaccggccacggcaccguggugaugcaggugaaggugagcaagggcgcccccugcagaauccccgugaucguggccgacgaccugaccgccgccaucaacaagggcauccuggugaccgugaaccccaucgccagcaccaacgacgacgaggugcugaucgaggugaacccccccuucggcgacagcuacaucaucgugggcagaggcgacagcagacugaccuaccaguggcacaaggagggcagcagcaucggcaagcuguucacccagaccaugaagggcguggagagacuggccgugaugggcgacaccgccugggacuucagcagcgccggcggcuucuucaccagcgugggcaagggcauccacaccguguucggcagcgccuuccagggccuguucggcggccugaacuggaucaccaaggugaucaugggcgccgugcugaucugggugggcaucaacaccagaaacaugaccaugagcaugagcaugauccuggugggcgugaucaugauguuccugagccugggcgugggcgccugaggacuagucccuguucccagagcccacuuuuuuuucuuuuuuugaaauaaaauagccugucuuucagaucuaaaaaaaaaaaaaaaaaaaaaaaaaaaaaaaaaaaaaaaaaaaaaaaaaaaaaaaaaaaaaaaaugcaucccccccccccccccccccccccccccccccaaaggcucuuuucagagccaccagaauu

SEQ ID NO: 1796 - RNA, 2365 nt, Artificial Sequence
  mRNA product Design d-1 comprising derived and/or modified sequence from YFV__NC_002031.1__SSjev(V3)-prME-XX (polyprotein: aa122-788) (opt4)
gggagacccgugacccggaaguuguacggcuacgcgacuuucccucccacaaacccucgcgcccuuccuuuccuacuugggcccggcagaaagcuuaccaugaacgagggcagcaucauguggcuggccagccuggccguggugaucgccugcgccggcgccgugacccuggugagaaagaacagauggcugcugcugaacgugaccagcgaggaccugggcaagaccuucagcgugggcaccggcaacugcaccaccaacauccuggaggccaaguacuggugccccgacagcauggaguacaacugccccaaccugagccccagagaggagcccgacgacaucgacugcuggugcuacggcguggagaacgugagaguggccuacggcaagugcgacagcgccggcagaagcagaagaagcagaagagccaucgaccugcccacccacgagaaccacggccugaagaccagacaggagaaguggaugaccggcagaaugggcgagagacagcugcagaagaucgagagaugguucgugagaaaccccuucuucgccgugaccgcccugaccaucgccuaccuggugggcagcaacaugacccagagaguggugaucgcccugcuggugcuggccgugggccccgccuacagcgcccacugcaucggcaucaccgacagagacuucaucgagggcgugcacggcggcaccugggugagcgccacccuggagcaggacaagugcgugaccgugauggcccccgacaagcccagccuggacaucagccuggagaccguggccaucgacagacccgccgaggugagaaaggugugcuacaacgccgugcugacccacgugaagaucaacgacaagugccccagcaccggcgaggcccaccuggccgaggagaacgagggcgacaacgccugcaagagaaccuacagcgacagaggcuggggcaacggcugcggccuguucggcaagggcagcaucguggccugcgccaaguucaccugcgccaagagcaugagccuguucgagguggaccagaccaagauccaguacgugaucagagcccagcugcacgugggcgccaagcaggagaacuggaacaccgacaucaagacccugaaguucgacgcccugagcggcagccaggagguggaguucaucggcuacggcaaggccacccuggagugccaggugcagaccgccguggacuucggcaacagcuacaucgccgagauggagaccgagagcuggaucguggacagacagugggcccaggaccugacccugcccuggcagagcggcagcggcggcguguggagagagaugcaccaccugguggaguucgagcccccccacgccgccaccaucagagugcuggcccugggcaaccaggagggcagccugaagaccgcccugaccggcgccaugagagugaccaaggacaccaacgacaacaaccuguacaagcugcacggcggccacgugagcugcagagugaagcugagcgcccugacccugaagggcaccagcuacaagaucugcaccgacaagauguucuucgugaagaaccccaccgacaccggccacggcaccguggugaugcaggugaaggugagcaagggcgcccccugcagaauccccgugaucguggccgacgaccugaccgccgccaucaacaagggcauccuggugaccgugaaccccaucgccagcaccaacgacgacgaggugcugaucgaggugaacccccccuucggcgacagcuacaucaucgugggcagaggcgacagcagacugaccuaccaguggcacaaggagggcagcagcaucggcaagcuguucacccagaccaugaagggcguggagagacuggccgugaugggcgacaccgccugggacuucagcagcgccggcggcuucuucaccagcgugggcaagggcauccacaccguguucggcagcgccuuccagggccuguucggcggccugaacuggaucaccaaggugaucaugggcgccgugcugaucugggugggcaucaacaccagaaacaugaccaugagcaugagcaugauccuggugggcgugaucaugauguuccugagccugggcgugggcgccgaccagggcugcgccaucaacuucggcaagugaggacuagucccuguucccagagcccacuuuuuuuucuuuuuuugaaauaaaauagccugucuuucagaucuaaaaaaaaaaaaaaaaaaaaaaaaaaaaaaaaaaaaaaaaaaaaaaaaaaaaaaaaaaaaaaaaugcaucccccccccccccccccccccccccccccccaaaggcucuuuucagagccaccagaauu

SEQ ID NO: 1797 - RNA, 2374 nt, Artificial Sequence
  mRNA product Design d-1 comprising derived and/or modified sequence from YFV__NC_002031.1__X-SS-prMEdelstem_TM-JEV (polyprotein: aa92-681) (opt5)
gggagacccgugacccggaaguuguacggcuacgcgacuuucccucccacaaacccucgcgcccuuccuuuccuacuugggcccggcagaaagcuuaccaugagaggccugagcucccggaagcgcagaucucacgacgugcucaccguccaguuccugauccuugggaugcugcucaugacaggaggcguuacgcuggugcggaaaaaccgcuggcuucugcucaaugugaccagcgaggaucuggggaagacauuuuccgucggaaccggcaacugcacaaccaauauucuggaagccaaauacuggugucccgacucuauggaguauaacugcccuaaucucagcccgagagaagaacccgaugacaucgauuguuggugcuacgggguggaaaacguucggguggcuuauggaaagugugacuccgccggccgcucuagacggagccgcagagcgauugaucugccuacacaugagaaucacggccuuaaaacccggcaagagaaguggaugacggggcgcaugggagaaagacagcugcagaagaucgagcggugguucguccgcaaccccuuuuucgcugugaccgcccucacaauugccuaccugguuggcuccaauaugacccagagaguggucaucgcccuucuggugcucgcuguggggccugcuuauagcgcccauugcaucggaauuacagaccgggauuuuaucgaaggcguccacgggggaaccuggguuucugcgacgcuggagcaagacaaaugugugacagugauggcccccgauaagccuucccuggacauuagccucgagaccgucgcuaucgauagaccggccgaagugcgcaaaguuugcuacaacgcugugcugacacaugucaagauuaaugacaaaugucccucuaccggcgaggcccaccuugcggaagagaacgaaggcgacaaugccugcaagcggaccuauuccgauagaggguggggaaacggcugugggcuguucggaaagggcagcaucguggcuugcgccaaauuuacaugcgcuaagucuaugucccucuucgagguugaccagacgaaaauucaguacgugauccgcgcccagcugcacgucggggccaagcaagagaauuggaacaccgauaucaaaacacuuaaguuugacgcucugagcggaucccaggaaguggaguucauuggcuacggcaaagcgacccucgaaugucagguccagacagccguggauuuugggaacucuuauaucgcugagauggaaaccgagagcuggauuguugaccggcaaugggcccaggaucugacgcugccuuggcaguccggaagcggcgggguguggagagagaugcaucaccucgucgaguucgagcccccucaugccgcuacaauccgcgugcuggcccuuggaaaucaagaaggcucucugaagaccgcgcucaccggggcuaugcggguuacaaaggacaccaacgauaauaaccuguacaaacuucacggcggacacguguccugcagagucaagcugagcgcccucacacugaaaggcacgucuuauaagauuuguaccgacaaaauguuuuucgugaagaaucccacagauaccgggcauggaacagugguuaugcaggucaaggugagcaaaggcgccccgugccgcaucccugugaucgucgcugacgaccugaccgccgcuauuaacaaggggauccucgugacgguuaaucccauugccuccaccaacgaugacgaggugcugaucgaagucaauccucccuucggagauucuuacauuaucgugggccggggagacagcagacuuacauaucaguggcacaaagagggcuccagcaucggcagcacccuggggaaggccuucuccacaacgcucaaaggagcucagagacuggccgcgcuuggcgacaccgcuugggauuuugggucuaucggaggcguguucaacagcauugggcgggccguccaccaaguuuuuggaggcgccuuccgcacacuguuuggcgggauguccuggaucacccagggacucaugggcgcucugcuucuguggaugggggugaaugccagagaccggucuauugcucucgccuuccuggcgacaggaggcgugcuggucuuucucgccaccaacgugcaugcuugaggacuagucccuguucccagagcccacuuuuuuuucuuuuuuugaaauaaaauagccugucuuucagaucuaaaaaaaaaaaaaaaaaaaaaaaaaaaaaaaaaaaaaaaaaaaaaaaaaaaaaaaaaaaaaaaaugcaucccccccccccccccccccccccccccccccaaaggcucuuuucagagccaccagaauu

SEQ ID NO: 1798 - RNA, 2347 nt, Artificial Sequence
  mRNA product Design d-1 comprising derived and/or modified sequence from YFV__NC_002031.1__SSjev(V3)-prMEdelstem_TM-JEV (polyprotein: aa122-681) (opt5)
gggagacccgugacccggaaguuguacggcuacgcgacuuucccucccacaaacccucgcgcccuuccuuuccuacuugggcccggcagaaagcuuaccaugaacgagggcagcaucauguggcuggccucccucgcuguggucauugccugcgcgggggcuguuacgcuggugcggaaaaaccgcuggcuucugcucaaugugaccagcgaggaucuggggaagacauuuuccgucggaaccggcaacugcacaaccaauauucuggaagccaaauacuggugucccgacucuauggaguauaacugcccuaaucucagcccgagagaagaacccgaugacaucgauuguuggugcuacgggguggaaaacguucggguggcuuauggaaagugugacuccgccggccgcucuagacggagccgcagagcgauugaucugccuacacaugagaaucacggccuuaaaacccggcaagagaaguggaugacggggcgcaugggagaaagacagcugcagaagaucgagcggugguucguccgcaaccccuuuuucgcugugaccgcccucacaauugccuaccugguuggcuccaauaugacccagagaguggucaucgcccuucuggugcucgcuguggggccugcuuauagcgcccauugcaucggaauuacagaccgggauuuuaucgaaggcguccacgggggaaccuggguuucugcgacgcuggagcaagacaaaugugugacagugauggcccccgauaagccuucccuggacauuagccucgagaccgucgcuaucgauagaccggccgaagugcgcaaaguuugcuacaacgcugugcugacacaugucaagauuaaugacaaaugucccucuaccggcgaggcccaccuugcggaagagaacgaaggcgacaaugccugcaagcggaccuauuccgauagaggguggggaaacggcugugggcuguucggaaagggcagcaucguggcuugcgccaaauuuacaugcgcuaagucuaugucccucuucgagguugaccagacgaaaauucaguacgugauccgcgcccagcugcacgucggggccaagcaagagaauuggaacaccgauaucaaaacacuuaaguuugacgcucugagcggaucccaggaaguggaguucauuggcuacggcaaagcgacccucgaaugucagguccagacagccguggauuuugggaacucuuauaucgcugagauggaaaccgagagcuggauuguugaccggcaaugggcccaggaucugacgcugccuuggcaguccggaagcggcgggguguggagagagaugcaucaccucgucgaguucgagcccccucaugccgcuacaauccgcgugcuggcccuuggaaaucaagaaggcucucugaagaccgcgcucaccggggcuaugcggguuacaaaggacaccaacgauaauaaccuguacaaacuucacggcggacacguguccugcagagucaagcugagcgcccucacacugaaaggcacgucuuauaagauuuguaccgacaaaauguuuuucgugaagaaucccacagauaccgggcauggaacagugguuaugcaggucaaggugagcaaaggcgccccgugccgcaucccugugaucgucgcugacgaccugaccgccgcuauuaacaaggggauccucgugacgguuaaucccauugccuccaccaacgaugacgaggugcugaucgaagucaauccucccuucggagauucuuacauuaucgugggccggggagacagcagacuuacauaucaguggcacaaagagggcuccagcaucggcagcacccuggggaaggccuucuccacaacgcucaaaggagcucagagacuggccgcgcuuggcgacaccgcuugggauuuugggucuaucggaggcguguucaacagcauugggcgggccguccaccaaguuuuuggaggcgccuuccgcacacuguuuggcgggauguccuggaucacccagggacucaugggcgcucugcuucuguggaugggggugaaugccagagaccggucuauugcucucgccuuccuggcgacaggaggcgugcuggucuuucucgccaccaacgugcaugcuugaggacuagucccuguucccagagcccacuuuuuuuucuuuuuuugaaauaaaauagccugucuuucagaucuaaaaaaaaaaaaaaaaaaaaaaaaaaaaaaaaaaaaaaaaaaaaaaaaaaaaaaaaaaaaaaaaugcaucccccccccccccccccccccccccccccccaaaggcucuuuucagagccaccagaauu

SEQ ID NO: 1799 - RNA, 2362 nt, Artificial Sequence
  mRNA product Design d-1 comprising derived and/or modified sequence from YFV__NC_002031.1__X-SS-prME (polyprotein: aa92-778) (opt5)
gggagacccgugacccggaaguuguacggcuacgcgacuuucccucccacaaacccucgcgcccuuccuuuccuacuugggcccggcagaaagcuuaccaugagaggccugagcucccggaagcgcagaucucacgacgugcucaccguccaguuccugauccuugggaugcugcucaugacaggaggcguuacgcuggugcggaaaaaccgcuggcuucugcucaaugugaccagcgaggaucuggggaagacauuuuccgucggaaccggcaacugcacaaccaauauucuggaagccaaauacuggugucccgacucuauggaguauaacugcccuaaucucagcccgagagaagaacccgaugacaucgauuguuggugcuacgggguggaaaacguucggguggcuuauggaaagugugacuccgccggccgcucuagacggagccgcagagcgauugaucugccuacacaugagaaucacggccuuaaaacccggcaagagaaguggaugacggggcgcaugggagaaagacagcugcagaagaucgagcggugguucguccgcaaccccuuuuucgcugugaccgcccucacaauugccuaccugguuggcuccaauaugacccagagaguggucaucgcccuucuggugcucgcuguggggccugcuuauagcgcccauugcaucggaauuacagaccgggauuuuaucgaaggcguccacgggggaaccuggguuucugcgacgcuggagcaagacaaaugugugacagugauggcccccgauaagccuucccuggacauuagccucgagaccgucgcuaucgauagaccggccgaagugcgcaaaguuugcuacaacgcugugcugacacaugucaagauuaaugacaaaugucccucuaccggcgaggcccaccuugcggaagagaacgaaggcgacaaugccugcaagcggaccuauuccgauagaggguggggaaacggcugugggcuguucggaaagggcagcaucguggcuugcgccaaauuuacaugcgcuaagucuaugucccucuucgagguugaccagacgaaaauucaguacgugauccgcgcccagcugcacgucggggccaagcaagagaauuggaacaccgauaucaaaacacuuaaguuugacgcucugagcggaucccaggaaguggaguucauuggcuacggcaaagcgacccucgaaugucagguccagacagccguggauuuugggaacucuuauaucgcugagauggaaaccgagagcuggauuguugaccggcaaugggcccaggaucugacgcugccuuggcaguccggaagcggcgggguguggagagagaugcaucaccucgucgaguucgagcccccucaugccgcuacaauccgcgugcuggcccuuggaaaucaagaaggcucucugaagaccgcgcucaccggggcuaugcggguuacaaaggacaccaacgauaauaaccuguacaaacuucacggcggacacguguccugcagagucaagcugagcgcccucacacugaaaggcacgucuuauaagauuuguaccgacaaaauguuuuucgugaagaaucccacagauaccgggcauggaacagugguuaugcaggucaaggugagcaaaggcgccccgugccgcaucccugugaucgucgcugacgaccugaccgccgcuauuaacaaggggauccucgugacgguuaaucccauugccuccaccaacgaugacgaggugcugaucgaagucaauccucccuucggagauucuuacauuaucgugggccggggagacagcagacuuacauaucaguggcacaaagagggcuccagcaucggaaagcuguuuacccagacaaugaaaggcguugagcgccucgcggugaugggggauaccgccugggacuucucuuccgcuggaggcuuuuucacgagcgucgggaaggggauucauacaguguuuggcucugccuuccaagggcuguuuggcggacugaacuggaucaccaagguuauuaugggcgcugugcuuaucugggucgggauuaauacacggaacaugaccauguccaugagcaugauccucgugggagugauuaugauguuccugucccugggcgucggggccugaggacuagucccuguucccagagcccacuuuuuuuucuuuuuuugaaauaaaauagccugucuuucagaucuaaaaaaaaaaaaaaaaaaaaaaaaaaaaaaaaaaaaaaaaaaaaaaaaaaaaaaaaaaaaaaaaugcaucccccccccccccccccccccccccccccccaaaggcucuuuucagagccaccagaauu

SEQ ID NO: 1800 - RNA, 2365 nt, Artificial Sequence
  mRNA product Design d-1 comprising derived and/or modified sequence from YFV__NC_002031.1__SSjev(V3)-prME-XX (polyprotein: aa122-788) (opt5)
gggagacccgugacccggaaguuguacggcuacgcgacuuucccucccacaaacccucgcgcccuuccuuuccuacuugggcccggcagaaagcuuaccaugaacgagggcagcaucauguggcuggccucccucgcuguggucauugccugcgcgggggcuguuacgcuggugcggaaaaaccgcuggcuucugcucaaugugaccagcgaggaucuggggaagacauuuuccgucggaaccggcaacugcacaaccaauauucuggaagccaaauacuggugucccgacucuauggaguauaacugcccuaaucucagcccgagagaagaacccgaugacaucgauuguuggugcuacgggguggaaaacguucggguggcuuauggaaagugugacuccgccggccgcucuagacggagccgcagagcgauugaucugccuacacaugagaaucacggccuuaaaacccggcaagagaaguggaugacggggcgcaugggagaaagacagcugcagaagaucgagcggugguucguccgcaaccccuuuuucgcugugaccgcccucacaauugccuaccugguuggcuccaauaugacccagagaguggucaucgcccuucuggugcucgcuguggggccugcuuauagcgcccauugcaucggaauuacagaccgggauuuuaucgaaggcguccacgggggaaccuggguuucugcgacgcuggagcaagacaaaugugugacagugauggcccccgauaagccuucccuggacauuagccucgagaccgucgcuaucgauagaccggccgaagugcgcaaaguuugcuacaacgcugugcugacacaugucaagauuaaugacaaaugucccucuaccggcgaggcccaccuugcggaagagaacgaaggcgacaaugccugcaagcggaccuauuccgauagaggguggggaaacggcugugggcuguucggaaagggcagcaucguggcuugcgccaaauuuacaugcgcuaagucuaugucccucuucgagguugaccagacgaaaauucaguacgugauccgcgcccagcugcacgucggggccaagcaagagaauuggaacaccgauaucaaaacacuuaaguuugacgcucugagcggaucccaggaaguggaguucauuggcuacggcaaagcgacccucgaaugucagguccagacagccguggauuuugggaacucuuauaucgcugagauggaaaccgagagcuggauuguugaccggcaaugggcccaggaucugacgcugccuuggcaguccggaagcggcgggguguggagagagaugcaucaccucgucgaguucgagcccccucaugccgcuacaauccgcgugcuggcccuuggaaaucaagaaggcucucugaagaccgcgcucaccggggcuaugcggguuacaaaggacaccaacgauaauaaccuguacaaacuucacggcggacacguguccugcagagucaagcugagcgcccucacacugaaaggcacgucuuauaagauuuguaccgacaaaauguuuuucgugaagaaucccacagauaccgggcauggaacagugguuaugcaggucaaggugagcaaaggcgccccgugccgcaucccugugaucgucgcugacgaccugaccgccgcuauuaacaaggggauccucgugacgguuaaucccauugccuccaccaacgaugacgaggugcugaucgaagucaauccucccuucggagauucuuacauuaucgugggccggggagacagcagacuuacauaucaguggcacaaagagggcuccagcaucggaaagcuguuuacccagacaaugaaaggcguugagcgccucgcggugaugggggauaccgccugggacuucucuuccgcuggaggcuuuuucacgagcgucgggaaggggauucauacaguguuuggcucugccuuccaagggcuguuuggcggacugaacuggaucaccaagguuauuaugggcgcugugcuuaucugggucgggauuaauacacggaacaugaccauguccaugagcaugauccucgugggagugauuaugauguuccugucccugggcgucggggccgaucagggaugugcgaucaauuuuggcaaaugaggacuagucccuguucccagagcccacuuuuuuuucuuuuuuugaaauaaaauagccugucuuucagaucuaaaaaaaaaaaaaaaaaaaaaaaaaaaaaaaaaaaaaaaaaaaaaaaaaaaaaaaaaaaaaaaaugcaucccccccccccccccccccccccccccccccaaaggcucuuuucagagccaccagaauu

SEQ ID NO: 1801 - RNA, 2374 nt, Artificial Sequence
  mRNA product Design d-1 comprising derived and/or modified sequence from YFV__NC_002031.1__X-SS-prMEdelstem_TM-JEV (polyprotein: aa92-681) (opt6)
gggagacccgugacccggaaguuguacggcuacgcgacuuucccucccacaaacccucgcgcccuuccuuuccuacuugggcccggcagaaagcuuaccaugagaggauuaucaaguagaaaaagaagaucacaugauguacuaaccgugcaauuuuugaucuuagggaugcucuuaaugacaggagguguuacauuaguaagaaagaaucgauggcugcuuuuaaaugugacaucagaggauuuagggaaaacauuuucgguaggaacaggaaauuguacuacaaauauacuugaagcaaaauauuggugcccagacucuauggaauauaauuguccaaauuuaaguccuagagaagaaccugacgauauagauuguugguguuaugguguagaaaauguaagaguagcauacggcaaaugcgauagugcaggacguucuagacguucaaggagagccauagaucugcccacucacgaaaaucacggauugaaaacacgacaagaaaaauggaugacugggcgaaugggagaaagacaacuacagaaaauugaaagaugguucguuagaaauccauucuuugccguaacagcuuuaacaauagccuauuuaguagguaguaauaugacacaaagaguaguaauagcauugcuaguguuagcaguuggaccagcuuauagugcacauugcauaggaauaacagauagagacuuuauagaaggaguacacgggggaacuuggguaagugccacuuuagaacaagauaaauguguuacagugauggcgccagauaaaccaagucuggacauaaguuuggaaacaguagcgauugauagacccgcagaaguaagaaaaguuuguuauaaugcuguucuaacccauguuaaaauaaaugauaaaugcccuagcaccggagaagcccaucuagcagaagaaaaugaaggagauaacgcauguaaacgaacauacucagauagaggauggggcaacggauguggcuuguuuggaaaagguagcauaguagcaugcgcuaaauuuacaugcgcaaagucaaugucauuauuugaaguagaucaaacaaaaauacaauauguaauaagagcucaauuacacgugggugcaaaacaagaaaauuggaauacagacauaaagacacuaaaguucgacgcauuaaguggaucacaagagguagaauuuauaggguacggaaaagcgacuuuagagugucaaguccaaacagcaguagauuucgguaacucauacauagcagaaauggaaacugaaaguuggauaguagauagacaaugggcacaagacuugacacuaccuuggcaaucaggaagcggaggaguauggagagaaaugcaucauuuaguagaauuugaaccaccucaugcagcaacaauaagaguauuagcccuaggaaaccaagaaggaaguuuaaaaacagcacuaacaggagcuaugagaguaacaaaagauacaaaugacaacaaucuauacaaauuacacggaggacauguaagcugccggguaaaguugagcgcacuaacauuaaaaggaacgaguuauaaaauaugcacagauaaaauguucuuuguuaaaaauccuacagauaccggucauggaacaguaguaaugcaaguaaaaguaaguaaaggcgcucccuguagaauaccuguaauagucgcagacgauuuaaccgcagcaauaaauaaaggaauauuagucacgguaaacccaauagcgucaacaaaugaugaugaaguauuaauagaaguuaacccaccuuuuggagacaguuauauaauagucggaaggggugauaguagacuaacauaccaauggcauaaagaaggaagcucaauaggaaguacacuaggaaaagcauuuaguacaacauuaaaaggagcacaaagauuagcagcauuaggagauacagcaugggauuuuggaagcauaggaggaguauuuaauaguauagguagagcaguacaucaaguauuuggaggagcauuuagaacauuauuuggaggaaugaguuggauaacacaaggauuaaugggagcauuauuauuauggaugggaguaaaugcaagagauagaaguauagcauuagcauuuuuagcaacaggaggaguauuaguauuuuuagcaacaaauguacaugcaugaggacuagucccuguucccagagcccacuuuuuuuucuuuuuuugaaauaaaauagccugucuuucagaucuaaaaaaaaaaaaaaaaaaaaaaaaaaaaaaaaaaaaaaaaaaaaaaaaaaaaaaaaaaaaaaaaugcaucccccccccccccccccccccccccccccccaaaggcucuuuucagagccaccagaauu

SEQ ID NO: 1802 - RNA, 2347 nt, Artificial Sequence
  mRNA product Design d-1 comprising derived and/or modified sequence from YFV__NC_002031.1__SSjev(V3)-prMEdelstem_TM-JEV (polyprotein: aa122-681) (opt6)
gggagacccgugacccggaaguuguacggcuacgcgacuuucccucccacaaacccucgcgcccuuccuuuccuacuugggcccggcagaaagcuuaccaugaaugaagguucaauuaugugguuggcaucauuagcaguuguaauugcaugugcuggugcaguuacauuaguaagaaagaaucgauggcugcuuuuaaaugugacaucagaggauuuagggaaaacauuuucgguaggaacaggaaauuguacuacaaauauacuugaagcaaaauauuggugcccagacucuauggaauauaauuguccaaauuuaaguccuagagaagaaccugacgauauagauuguugguguuaugguguagaaaauguaagaguagcauacggcaaaugcgauagugcaggacguucuagacguucaaggagagccauagaucugcccacucacgaaaaucacggauugaaaacacgacaagaaaaauggaugacugggcgaaugggagaaagacaacuacagaaaauugaaagaugguucguuagaaauccauucuuugccguaacagcuuuaacaauagccuauuuaguagguaguaauaugacacaaagaguaguaauagcauugcuaguguuagcaguuggaccagcuuauagugcacauugcauaggaauaacagauagagacuuuauagaaggaguacacgggggaacuuggguaagugccacuuuagaacaagauaaauguguuacagugauggcgccagauaaaccaagucuggacauaaguuuggaaacaguagcgauugauagacccgcagaaguaagaaaaguuuguuauaaugcuguucuaacccauguuaaaauaaaugauaaaugcccuagcaccggagaagcccaucuagcagaagaaaaugaaggagauaacgcauguaaacgaacauacucagauagaggauggggcaacggauguggcuuguuuggaaaagguagcauaguagcaugcgcuaaauuuacaugcgcaaagucaaugucauuauuugaaguagaucaaacaaaaauacaauauguaauaagagcucaauuacacgugggugcaaaacaagaaaauuggaauacagacauaaagacacuaaaguucgacgcauuaaguggaucacaagagguagaauuuauaggguacggaaaagcgacuuuagagugucaaguccaaacagcaguagauuucgguaacucauacauagcagaaauggaaacugaaaguuggauaguagauagacaaugggcacaagacuugacacuaccuuggcaaucaggaagcggaggaguauggagagaaaugcaucauuuaguagaauuugaaccaccucaugcagcaacaauaagaguauuagcccuaggaaaccaagaaggaaguuuaaaaacagcacuaacaggagcuaugagaguaacaaaagauacaaaugacaacaaucuauacaaauuacacggaggacauguaagcugccggguaaaguugagcgcacuaacauuaaaaggaacgaguuauaaaauaugcacagauaaaauguucuuuguuaaaaauccuacagauaccggucauggaacaguaguaaugcaaguaaaaguaaguaaaggcgcucccuguagaauaccuguaauagucgcagacgauuuaaccgcagcaauaaauaaaggaauauuagucacgguaaacccaauagcgucaacaaaugaugaugaaguauuaauagaaguuaacccaccuuuuggagacaguuauauaauagucggaaggggugauaguagacuaacauaccaauggcauaaagaaggaagcucaauaggaaguacacuaggaaaagcauuuaguacaacauuaaaaggagcacaaagauuagcagcauuaggagauacagcaugggauuuuggaagcauaggaggaguauuuaauaguauagguagagcaguacaucaaguauuuggaggagcauuuagaacauuauuuggaggaaugaguuggauaacacaaggauuaaugggagcauuauuauuauggaugggaguaaaugcaagagauagaaguauagcauuagcauuuuuagcaacaggaggaguauuaguauuuuuagcaacaaauguacaugcaugaggacuagucccuguucccagagcccacuuuuuuuucuuuuuuugaaauaaaauagccugucuuucagaucuaaaaaaaaaaaaaaaaaaaaaaaaaaaaaaaaaaaaaaaaaaaaaaaaaaaaaaaaaaaaaaaaugcaucccccccccccccccccccccccccccccccaaaggcucuuuucagagccaccagaauu

SEQ ID NO: 1803 - RNA, 2362 nt, Artificial Sequence
  mRNA product Design d-1 comprising derived and/or modified sequence from YFV__NC_002031.1__X-SS-prME (polyprotein: aa92-778) (opt6)
gggagacccgugacccggaaguuguacggcuacgcgacuuucccucccacaaacccucgcgcccuuccuuuccuacuugggcccggcagaaagcuuaccaugagaggauuaucaaguagaaaaagaagaucacaugauguacuaaccgugcaauuuuugaucuuagggaugcucuuaaugacaggagguguuacauuaguaagaaagaaucgauggcugcuuuuaaaugugacaucagaggauuuagggaaaacauuuucgguaggaacaggaaauuguacuacaaauauacuugaagcaaaauauuggugcccagacucuauggaauauaauuguccaaauuuaaguccuagagaagaaccugacgauauagauuguugguguuaugguguagaaaauguaagaguagcauacggcaaaugcgauagugcaggacguucuagacguucaaggagagccauagaucugcccacucacgaaaaucacggauugaaaacacgacaagaaaaauggaugacugggcgaaugggagaaagacaacuacagaaaauugaaagaugguucguuagaaauccauucuuugccguaacagcuuuaacaauagccuauuuaguagguaguaauaugacacaaagaguaguaauagcauugcuaguguuagcaguuggaccagcuuauagugcacauugcauaggaauaacagauagagacuuuauagaaggaguacacgggggaacuuggguaagugccacuuuagaacaagauaaauguguuacagugauggcgccagauaaaccaagucuggacauaaguuuggaaacaguagcgauugauagacccgcagaaguaagaaaaguuuguuauaaugcuguucuaacccauguuaaaauaaaugauaaaugcccuagcaccggagaagcccaucuagcagaagaaaaugaaggagauaacgcauguaaacgaacauacucagauagaggauggggcaacggauguggcuuguuuggaaaagguagcauaguagcaugcgcuaaauuuacaugcgcaaagucaaugucauuauuugaaguagaucaaacaaaaauacaauauguaauaagagcucaauuacacgugggugcaaaacaagaaaauuggaauacagacauaaagacacuaaaguucgacgcauuaaguggaucacaagagguagaauuuauaggguacggaaaagcgacuuuagagugucaaguccaaacagcaguagauuucgguaacucauacauagcagaaauggaaacugaaaguuggauaguagauagacaaugggcacaagacuugacacuaccuuggcaaucaggaagcggaggaguauggagagaaaugcaucauuuaguagaauuugaaccaccucaugcagcaacaauaagaguauuagcccuaggaaaccaagaaggaaguuuaaaaacagcacuaacaggagcuaugagaguaacaaaagauacaaaugacaacaaucuauacaaauuacacggaggacauguaagcugccggguaaaguugagcgcacuaacauuaaaaggaacgaguuauaaaauaugcacagauaaaauguucuuuguuaaaaauccuacagauaccggucauggaacaguaguaaugcaaguaaaaguaaguaaaggcgcucccuguagaauaccuguaauagucgcagacgauuuaaccgcagcaauaaauaaaggaauauuagucacgguaaacccaauagcgucaacaaaugaugaugaaguauuaauagaaguuaacccaccuuuuggagacaguuauauaauagucggaaggggugauaguagacuaacauaccaauggcauaaagaaggaagcucaauaggaaaauuauuuacucaaaccaugaaagguguagaaaggcuagcuguuaugggugacacagcaugggauuuuucaagcgcaggaggguucuuuacaucaguagguaaaggaauacauacaguauuuggaagugcauuucaaggauuauuuggugguuuaaauuggauaacaaaaguaauaaugggcgcaguuuuaauauggguagguauaaacacaagaaauaugacaaugucuaugaguaugauauuggucggaguaauaaugauguuuuuaucacuaggagugggugcaugaggacuagucccuguucccagagcccacuuuuuuuucuuuuuuugaaauaaaauagccugucuuucagaucuaaaaaaaaaaaaaaaaaaaaaaaaaaaaaaaaaaaaaaaaaaaaaaaaaaaaaaaaaaaaaaaaugcaucccccccccccccccccccccccccccccccaaaggcucuuuucagagccaccagaauu

SEQ ID NO: 1804 - RNA, 2365 nt, Artificial Sequence
  mRNA product Design d-1 comprising derived and/or modified sequence from YFV__NC_002031.1__SSjev(V3)-prME-XX (polyprotein: aa122-788) (opt6)
gggagacccgugacccggaaguuguacggcuacgcgacuuucccucccacaaacccucgcgcccuuccuuuccuacuugggcccggcagaaagcuuaccaugaaugaagguucaauuaugugguuggcaucauuagcaguuguaauugcaugugcuggugcaguuacauuaguaagaaagaaucgauggcugcuuuuaaaugugacaucagaggauuuagggaaaacauuuucgguaggaacaggaaauuguacuacaaauauacuugaagcaaaauauuggugcccagacucuauggaauauaauuguccaaauuuaaguccuagagaagaaccugacgauauagauuguugguguuaugguguagaaaauguaagaguagcauacggcaaaugcgauagugcaggacguucuagacguucaaggagagccauagaucugcccacucacgaaaaucacggauugaaaacacgacaagaaaaauggaugacugggcgaaugggagaaagacaacuacagaaaauugaaagaugguucguuagaaauccauucuuugccguaacagcuuuaacaauagccuauuuaguagguaguaauaugacacaaagaguaguaauagcauugcuaguguuagcaguuggaccagcuuauagugcacauugcauaggaauaacagauagagacuuuauagaaggaguacacgggggaacuuggguaagugccacuuuagaacaagauaaauguguuacagugauggcgccagauaaaccaagucuggacauaaguuuggaaacaguagcgauugauagacccgcagaaguaagaaaaguuuguuauaaugcuguucuaacccauguuaaaauaaaugauaaaugcccuagcaccggagaagcccaucuagcagaagaaaaugaaggagauaacgcauguaaacgaacauacucagauagaggauggggcaacggauguggcuuguuuggaaaagguagcauaguagcaugcgcuaaauuuacaugcgcaaagucaaugucauuauuugaaguagaucaaacaaaaauacaauauguaauaagagcucaauuacacgugggugcaaaacaagaaaauuggaauacagacauaaagacacuaaaguucgacgcauuaaguggaucacaagagguagaauuuauaggguacggaaaagcgacuuuagagugucaaguccaaacagcaguagauuucgguaacucauacauagcagaaauggaaacugaaaguuggauaguagauagacaaugggcacaagacuugacacuaccuuggcaaucaggaagcggaggaguauggagagaaaugcaucauuuaguagaauuugaaccaccucaugcagcaacaauaagaguauuagcccuaggaaaccaagaaggaaguuuaaaaacagcacuaacaggagcuaugagaguaacaaaagauacaaaugacaacaaucuauacaaauuacacggaggacauguaagcugccggguaaaguugagcgcacuaacauuaaaaggaacgaguuauaaaauaugcacagauaaaauguucuuuguuaaaaauccuacagauaccggucauggaacaguaguaaugcaaguaaaaguaaguaaaggcgcucccuguagaauaccuguaauagucgcagacgauuuaaccgcagcaauaaauaaaggaauauuagucacgguaaacccaauagcgucaacaaaugaugaugaaguauuaauagaaguuaacccaccuuuuggagacaguuauauaauagucggaaggggugauaguagacuaacauaccaauggcauaaagaaggaagcucaauaggaaaauuauuuacucaaaccaugaaagguguagaaaggcuagcuguuaugggugacacagcaugggauuuuucaagcgcaggaggguucuuuacaucaguagguaaaggaauacauacaguauuuggaagugcauuucaaggauuauuuggugguuuaaauuggauaacaaaaguaauaaugggcgcaguuuuaauauggguagguauaaacacaagaaauaugacaaugucuaugaguaugauauuggucggaguaauaaugauguuuuuaucacuaggagugggugcagaucaagguugcgcuauuaauuuuggaaaaugaggacuagucccuguucccagagcccacuuuuuuuucuuuuuuugaaauaaaauagccugucuuucagaucuaaaaaaaaaaaaaaaaaaaaaaaaaaaaaaaaaaaaaaaaaaaaaaaaaaaaaaaaaaaaaaaaugcaucccccccccccccccccccccccccccccccaaaggcucuuuucagagccaccagaauu

SEQ ID NO: 1805 - RNA, 2374 nt, Artificial Sequence
  mRNA product Design d-1 comprising derived and/or modified sequence from YFV__NC_002031.1__X-SS-prMEdelstem_TM-JEV (polyprotein: aa92-681) (opt11)
gggagacccgugacccggaaguuguacggcuacgcgacuuucccucccacaaacccucgcgcccuuccuuuccuacuugggcccggcagaaagcuuaccaugcggggacuaagcagcagaaaaagacgcagccacgaugugcucaccgugcaauuccucauacuggggaugcuccuaaugaccggaggcgugacccuaguaaggaaaaacagauggcuacuacuaaacguaaccucagaagaucuaggaaagacauuuucagucggcacaggcaacugcacaaccaacauacuagaagcaaaauauuggugcccagacagcauggaauacaacugucccaaccucagcccaagagaggaaccagacgacauagacugcugguguuacggaguagaaaacguaagaguggcauacggcaaaugcgacagcgcaggcaggagccgaagaucccgcagagccaucgacuugcccacgcacgaaaaccacggccucaaaacacgacaagaaaaauggaugacagggcgaaugggagaacgacagcuccagaaaauagaacgaugguucguccggaacccguucuucgcaguaacggcacuaacaaucgcauaccucguaggcagcaacaugacacaaagaguggucaucgcgcuacucguacuagcaguggggcccgcauacagugcacacugcauaggaaucacagaccgugacuucaucgaaggcguacacggaggaacguggguaagcgcgacacuggaacaagacaaaugcgugacaguaauggcaccagacaaaccaagccuagacauaucccuagaaacggucgccaucgaccgucccgcagaaguacgaaagguaugcuauaaugcaguccucacacacgucaaaauaaacgacaaaugccccagcacgggcgaagcacaccucgccgaagaaaacgaaggggauaacgcgugcaaacgcaccuacuccgacaggggauggggcaacggaugcggacuguucggaaaaggauccauagucgcaugcgcaaaauuuaccugcgcaaaaagcaugagcuuguucgagguagaccaaacgaagauccaauacguaauccgagcucaacuacacguuggggccaagcaagagaacuggaauacggacaucaaaacacuaaaauucgacgcacucuccggcucacaagaagucgaguucaucggcuacggcaaagcaacacuagaaugccaaguacaaacagcgguggacuucggcaacagcuacauagcagaaauggaaacagaaagcuggauaguagaccgacaaugggcacaagaccuaacucugccauggcaaagcggcucaggaggaguguggagagagaugcaccaccugguagaguucgaacccccacacgcagcaacaauaaggguacuggcacuaggcaaccaagaaggcagccuaaaaaccgcacucacaggagccaugcgcgugacgaaggacaccaacgacaacaaccucuacaaacuccacggagggcacguauccugccgcguaaaacuaucagcacuaacgcuaaaaggaacaagcuacaaaauaugcacagacaaaauguucuucgucaaaaaccccacagacacaggccacggcacagucguaaugcaagugaaggucagcaagggggcccccugccgaaucccagucauaguggcagacgaccucacggccgccaucaacaaagggauccugguaacagugaacccaauagcaucgaccaacgacgacgaaguccucauagaagugaaucccccguucggcgacagcuacaucaucguaggacgcggcgacucccgacugacguaccaauggcauaaagaaggcagcagcauugggagcacgcucgggaaagcguucucgaccacgcucaagggcgcgcaaaggcucgcggccuugggcgauaccgcgugggauuucgggagcauaggcggggucuuuaacucgaucgggcgcgcgguccaucaaguguucgggggcgcguucaggaccuuguucgggggcaugagcuggaucacgcaagggcucaugggcgcgcucuugcucuggaugggggucaaugccagggacaggagcauagccuuggccuuucucgcgaccgggggcgugcucguguucuuggccacgaacgugcacgcgugaggacuagucccuguucccagagcccacuuuuuuuucuuuuuuugaaauaaaauagccugucuuucagaucuaaaaaaaaaaaaaaaaaaaaaaaaaaaaaaaaaaaaaaaaaaaaaaaaaaaaaaaaaaaaaaaaugcaucccccccccccccccccccccccccccccccaaaggcucuuuucagagccaccagaauu

SEQ ID NO: 1806 - RNA, 2347 nt, Artificial Sequence
  mRNA product Design d-1 comprising derived and/or modified sequence from YFV__NC_002031.1__SSjev(V3)-prMEdelstem_TM-JEV (polyprotein: aa122-681) (opt11)
gggagacccgugacccggaaguuguacggcuacgcgacuuucccucccacaaacccucgcgcccuuccuuuccuacuugggcccggcagaaagcuuaccaugaacgagggcucgaucaugugguuggccucgcucgcggucgugaucgcgugcgcgggcgcggugacccuaguaaggaaaaacagauggcuacuacuaaacguaaccucagaagaucuaggaaagacauuuucagucggcacaggcaacugcacaaccaacauacuagaagcaaaauauuggugcccagacagcauggaauacaacugucccaaccucagcccaagagaggaaccagacgacauagacugcugguguuacggaguagaaaacguaagaguggcauacggcaaaugcgacagcgcaggcaggagccgaagaucccgcagagccaucgacuugcccacgcacgaaaaccacggccucaaaacacgacaagaaaaauggaugacagggcgaaugggagaacgacagcuccagaaaauagaacgaugguucguccggaacccguucuucgcaguaacggcacuaacaaucgcauaccucguaggcagcaacaugacacaaagaguggucaucgcgcuacucguacuagcaguggggcccgcauacagugcacacugcauaggaaucacagaccgugacuucaucgaaggcguacacggaggaacguggguaagcgcgacacuggaacaagacaaaugcgugacaguaauggcaccagacaaaccaagccuagacauaucccuagaaacggucgccaucgaccgucccgcagaaguacgaaagguaugcuauaaugcaguccucacacacgucaaaauaaacgacaaaugccccagcacgggcgaagcacaccucgccgaagaaaacgaaggggauaacgcgugcaaacgcaccuacuccgacaggggauggggcaacggaugcggacuguucggaaaaggauccauagucgcaugcgcaaaauuuaccugcgcaaaaagcaugagcuuguucgagguagaccaaacgaagauccaauacguaauccgagcucaacuacacguuggggccaagcaagagaacuggaauacggacaucaaaacacuaaaauucgacgcacucuccggcucacaagaagucgaguucaucggcuacggcaaagcaacacuagaaugccaaguacaaacagcgguggacuucggcaacagcuacauagcagaaauggaaacagaaagcuggauaguagaccgacaaugggcacaagaccuaacucugccauggcaaagcggcucaggaggaguguggagagagaugcaccaccugguagaguucgaacccccacacgcagcaacaauaaggguacuggcacuaggcaaccaagaaggcagccuaaaaaccgcacucacaggagccaugcgcgugacgaaggacaccaacgacaacaaccucuacaaacuccacggagggcacguauccugccgcguaaaacuaucagcacuaacgcuaaaaggaacaagcuacaaaauaugcacagacaaaauguucuucgucaaaaaccccacagacacaggccacggcacagucguaaugcaagugaaggucagcaagggggcccccugccgaaucccagucauaguggcagacgaccucacggccgccaucaacaaagggauccugguaacagugaacccaauagcaucgaccaacgacgacgaaguccucauagaagugaaucccccguucggcgacagcuacaucaucguaggacgcggcgacucccgacugacguaccaauggcauaaagaaggcagcagcauugggagcacgcucgggaaagcguucucgaccacgcucaagggcgcgcaaaggcucgcggccuugggcgauaccgcgugggauuucgggagcauaggcggggucuuuaacucgaucgggcgcgcgguccaucaaguguucgggggcgcguucaggaccuuguucgggggcaugagcuggaucacgcaagggcucaugggcgcgcucuugcucuggaugggggucaaugccagggacaggagcauagccuuggccuuucucgcgaccgggggcgugcucguguucuuggccacgaacgugcacgcgugaggacuagucccuguucccagagcccacuuuuuuuucuuuuuuugaaauaaaauagccugucuuucagaucuaaaaaaaaaaaaaaaaaaaaaaaaaaaaaaaaaaaaaaaaaaaaaaaaaaaaaaaaaaaaaaaaugcaucccccccccccccccccccccccccccccccaaaggcucuuuucagagccaccagaauu

SEQ ID NO: 1807 - RNA, 2362 nt, Artificial Sequence
  mRNA product Design d-1 comprising derived and/or modified sequence from YFV__NC_002031.1__X-SS-prME (polyprotein: aa92-778) (opt11)
gggagacccgugacccggaaguuguacggcuacgcgacuuucccucccacaaacccucgcgcccuuccuuuccuacuugggcccggcagaaagcuuaccaugcggggacuaagcagcagaaaaagacgcagccacgaugugcucaccgugcaauuccucauacuggggaugcuccuaaugaccggaggcgugacccuaguaaggaaaaacagauggcuacuacuaaacguaaccucagaagaucuaggaaagacauuuucagucggcacaggcaacugcacaaccaacauacuagaagcaaaauauuggugcccagacagcauggaauacaacugucccaaccucagcccaagagaggaaccagacgacauagacugcugguguuacggaguagaaaacguaagaguggcauacggcaaaugcgacagcgcaggcaggagccgaagaucccgcagagccaucgacuugcccacgcacgaaaaccacggccucaaaacacgacaagaaaaauggaugacagggcgaaugggagaacgacagcuccagaaaauagaacgaugguucguccggaacccguucuucgcaguaacggcacuaacaaucgcauaccucguaggcagcaacaugacacaaagaguggucaucgcgcuacucguacuagcaguggggcccgcauacagugcacacugcauaggaaucacagaccgugacuucaucgaaggcguacacggaggaacguggguaagcgcgacacuggaacaagacaaaugcgugacaguaauggcaccagacaaaccaagccuagacauaucccuagaaacggucgccaucgaccgucccgcagaaguacgaaagguaugcuauaaugcaguccucacacacgucaaaauaaacgacaaaugccccagcacgggcgaagcacaccucgccgaagaaaacgaaggggauaacgcgugcaaacgcaccuacuccgacaggggauggggcaacggaugcggacuguucggaaaaggauccauagucgcaugcgcaaaauuuaccugcgcaaaaagcaugagcuuguucgagguagaccaaacgaagauccaauacguaauccgagcucaacuacacguuggggccaagcaagagaacuggaauacggacaucaaaacacuaaaauucgacgcacucuccggcucacaagaagucgaguucaucggcuacggcaaagcaacacuagaaugccaaguacaaacagcgguggacuucggcaacagcuacauagcagaaauggaaacagaaagcuggauaguagaccgacaaugggcacaagaccuaacucugccauggcaaagcggcucaggaggaguguggagagagaugcaccaccugguagaguucgaacccccacacgcagcaacaauaaggguacuggcacuaggcaaccaagaaggcagccuaaaaaccgcacucacaggagccaugcgcgugacgaaggacaccaacgacaacaaccucuacaaacuccacggagggcacguauccugccgcguaaaacuaucagcacuaacgcuaaaaggaacaagcuacaaaauaugcacagacaaaauguucuucgucaaaaaccccacagacacaggccacggcacagucguaaugcaagugaaggucagcaagggggcccccugccgaaucccagucauaguggcagacgaccucacggccgccaucaacaaagggauccugguaacagugaacccaauagcaucgaccaacgacgacgaaguccucauagaagugaaucccccguucggcgacagcuacaucaucguaggacgcggcgacucccgacugacguaccaauggcauaaagaaggcagcagcauuggaaaacuauucacccaaaccaugaagggcgucgaaagacucgcggugaugggagacaccgcaugggacuucucgagcgcaggcggcuucuucacaagcguaggaaaagggauucacacaguauucggauccgcauuccaaggccucuucgggggacuaaacuggauaacgaaaguaauaaugggagcaguucucauauggguaggaaucaacacacgaaacaugacaauguccaugucaaugauacucguaggcguaaucaugauguuucugucacucggagugggagcaugaggacuagucccuguucccagagcccacuuuuuuuucuuuuuuugaaauaaaauagccugucuuucagaucuaaaaaaaaaaaaaaaaaaaaaaaaaaaaaaaaaaaaaaaaaaaaaaaaaaaaaaaaaaaaaaaaugcaucccccccccccccccccccccccccccccccaaaggcucuuuucagagccaccagaauu

SEQ ID NO: 1808 - RNA, 2365 nt, Artificial Sequence
  mRNA product Design d-1 comprising derived and/or modified sequence from YFV__NC_002031.1__SSjev(V3)-prME-XX (polyprotein: aa122-788) (opt11)
gggagacccgugacccggaaguuguacggcuacgcgacuuucccucccacaaacccucgcgcccuuccuuuccuacuugggcccggcagaaagcuuaccaugaacgagggcucgaucaugugguuggccucgcucgcggucgugaucgcgugcgcgggcgcggugacccuaguaaggaaaaacagauggcuacuacuaaacguaaccucagaagaucuaggaaagacauuuucagucggcacaggcaacugcacaaccaacauacuagaagcaaaauauuggugcccagacagcauggaauacaacugucccaaccucagcccaagagaggaaccagacgacauagacugcugguguuacggaguagaaaacguaagaguggcauacggcaaaugcgacagcgcaggcaggagccgaagaucccgcagagccaucgacuugcccacgcacgaaaaccacggccucaaaacacgacaagaaaaauggaugacagggcgaaugggagaacgacagcuccagaaaauagaacgaugguucguccggaacccguucuucgcaguaacggcacuaacaaucgcauaccucguaggcagcaacaugacacaaagaguggucaucgcgcuacucguacuagcaguggggcccgcauacagugcacacugcauaggaaucacagaccgugacuucaucgaaggcguacacggaggaacguggguaagcgcgacacuggaacaagacaaaugcgugacaguaauggcaccagacaaaccaagccuagacauaucccuagaaacggucgccaucgaccgucccgcagaaguacgaaagguaugcuauaaugcaguccucacacacgucaaaauaaacgacaaaugccccagcacgggcgaagcacaccucgccgaagaaaacgaaggggauaacgcgugcaaacgcaccuacuccgacaggggauggggcaacggaugcggacuguucggaaaaggauccauagucgcaugcgcaaaauuuaccugcgcaaaaagcaugagcuuguucgagguagaccaaacgaagauccaauacguaauccgagcucaacuacacguuggggccaagcaagagaacuggaauacggacaucaaaacacuaaaauucgacgcacucuccggcucacaagaagucgaguucaucggcuacggcaaagcaacacuagaaugccaaguacaaacagcgguggacuucggcaacagcuacauagcagaaauggaaacagaaagcuggauaguagaccgacaaugggcacaagaccuaacucugccauggcaaagcggcucaggaggaguguggagagagaugcaccaccugguagaguucgaacccccacacgcagcaacaauaaggguacuggcacuaggcaaccaagaaggcagccuaaaaaccgcacucacaggagccaugcgcgugacgaaggacaccaacgacaacaaccucuacaaacuccacggagggcacguauccugccgcguaaaacuaucagcacuaacgcuaaaaggaacaagcuacaaaauaugcacagacaaaauguucuucgucaaaaaccccacagacacaggccacggcacagucguaaugcaagugaaggucagcaagggggcccccugccgaaucccagucauaguggcagacgaccucacggccgccaucaacaaagggauccugguaacagugaacccaauagcaucgaccaacgacgacgaaguccucauagaagugaaucccccguucggcgacagcuacaucaucguaggacgcggcgacucccgacugacguaccaauggcauaaagaaggcagcagcauuggaaaacuauucacccaaaccaugaagggcgucgaaagacucgcggugaugggagacaccgcaugggacuucucgagcgcaggcggcuucuucacaagcguaggaaaagggauucacacaguauucggauccgcauuccaaggccucuucgggggacuaaacuggauaacgaaaguaauaaugggagcaguucucauauggguaggaaucaacacacgaaacaugacaauguccaugucaaugauacucguaggcguaaucaugauguuucugucacucggagugggagcagaccaagguugcgccauaaacuucggcaagugaggacuagucccuguucccagagcccacuuuuuuuucuuuuuuugaaauaaaauagccugucuuucagaucuaaaaaaaaaaaaaaaaaaaaaaaaaaaaaaaaaaaaaaaaaaaaaaaaaaaaaaaaaaaaaaaaugcaucccccccccccccccccccccccccccccccaaaggcucuuuucagagccaccagaauu

SEQ ID NO: 1809 - RNA, 2525 nt, Artificial Sequence
  mRNA product Design d-5 comprising derived and/or modified sequence from YFV__NC_002031.1__X-SS-prMEdelstem_TM-JEV (polyprotein: aa92-681) (wt)
gggagagggcgcuuggcuugcaaggacccugagcugcggcauugaagcacacccaacccaacucgacugaagucagccucacugaaccggaucugagaaucuucucucucugggcuugccagggcucuccgaaccuagcuagcauccucuucaauuccaacuagaaagcuuaccaugagaggauuguccucaaggaaacgccguucccaugauguucugacugugcaauuccuaauuuugggaaugcuguugaugacggguggagugaccuuggugcggaaaaacagaugguugcuccuaaaugugacaucugaggaccucgggaaaacauucucugugggcacaggcaacugcacaacaaacauuuuggaagccaaguacuggugcccagacucaauggaauacaacugucccaaucucaguccaagagaggagccagaugacauugauugcuggugcuaugggguggaaaacguuagagucgcauaugguaagugugacucagcaggcaggucuaggaggucaagaagggccauugacuugccuacgcaugaaaaccaugguuugaagacccggcaagaaaaauggaugacuggaagaaugggugaaaggcaacuccaaaagauugagagaugguucgugaggaaccccuuuuuugcagugacggcucugaccauugccuaccuugugggaagcaacaugacgcaacgagucgugauugcccuacuggucuuggcuguugguccggccuacucagcucacugcauuggaauuacugacagggauuucauugagggggugcauggaggaacuuggguuucagcuacccuggagcaagacaagugugucacuguuauggccccugacaagccuucauuggacaucucacuagagacaguagccauugauagaccugcugaggugaggaaaguguguuacaaugcaguucucacucaugugaagauuaaugacaagugccccagcacuggagaggcccaccuagcugaagagaacgaaggggacaaugcgugcaagcgcacuuauucugauagaggcuggggcaauggcuguggccuauuugggaaagggagcauuguggcaugcgccaaauucacuugugccaaauccaugaguuuguuugagguugaucagaccaaaauucaguaugucaucagagcacaauugcauguaggggccaagcaggaaaauuggaauaccgacauuaagacucucaaguuugaugcccugucaggcucccaggaagucgaguucauuggguauggaaaagcuacacuggaaugccaggugcaaacugcgguggacuuugguaacaguuacaucgcugagauggaaacagagagcuggauaguggacagacagugggcccaggacuugacccugccauggcagaguggaaguggcgggguguggagagagaugcaucaucuugucgaauuugaaccuccgcaugccgccacuaucagaguacuggcccugggaaaccaggaaggcuccuugaaaacagcucuuacuggcgcaaugaggguuacaaaggacacaaaugacaacaaccuuuacaaacuacaugguggacauguuucuugcagagugaaauugucagcuuugacacucaaggggacauccuacaaaauaugcacugacaaaauguuuuuugucaagaacccaacugacacuggccauggcacuguugugaugcaggugaaagugucaaaaggagcccccugcaggauuccagugauaguagcugaugaucuuacagcggcaaucaauaaaggcauuuugguuacaguuaaccccaucgccucaaccaaugaugaugaagugcugauugaggugaacccaccuuuuggagacagcuacauuaucguugggagaggagauucacgucucacuuaccaguggcacaaagagggaagcucaauaggcagcacgcugggcaaggccuuuucaacaacuuugaagggagcucaaagacuggcagcguugggcgacacagccugggacuuuggcucuauuggaggggucuucaacuccauaggaagagccguucaccaaguguuugguggugccuucagaacacucuuugggggaaugucuuggaucacacaagggcuaaugggugcccuacugcucuggaugggcgucaacgcacgagaccgaucaauugcuuuggccuucuuagccacaggaggugugcucguguucuuagcgaccaaugugcacgccuaaggacuaguggaagcauuuuccuggcugauuaaaagaaauuacucagcuauggucaucuguuccuguuagaaggcuaugcagcauauuauauacuaugcgcauguuaugaaaugcauaauaaaaaauuuuaaaaaaucuaaaagaucuaaaaaaaaaaaaaaaaaaaaaaaaaaaaaaaaaaaaaaaaaaaaaaaaaaaaaaaaaaaaaaaaugcaucccccccccccccccccccccccccccccccaaaggcucuuuucagagccaccagaauu

SEQ ID NO: 1810 - RNA, 2498 nt, Artificial Sequence
  mRNA product Design d-5 comprising derived and/or modified sequence from YFV__NC_002031.1__SSjev(V3)-prMEdelstem_TM-JEV (polyprotein: aa122-681) (wt)
gggagagggcgcuuggcuugcaaggacccugagcugcggcauugaagcacacccaacccaacucgacugaagucagccucacugaaccggaucugagaaucuucucucucugggcuugccagggcucuccgaaccuagcuagcauccucuucaauuccaacuagaaagcuuaccaugaaugaaggcucaaucauguggcucgcgagcuuggcaguugucauagcuugugcaggagccgugaccuuggugcggaaaaacagaugguugcuccuaaaugugacaucugaggaccucgggaaaacauucucugugggcacaggcaacugcacaacaaacauuuuggaagccaaguacuggugcccagacucaauggaauacaacugucccaaucucaguccaagagaggagccagaugacauugauugcuggugcuaugggguggaaaacguuagagucgcauaugguaagugugacucagcaggcaggucuaggaggucaagaagggccauugacuugccuacgcaugaaaaccaugguuugaagacccggcaagaaaaauggaugacuggaagaaugggugaaaggcaacuccaaaagauugagagaugguucgugaggaaccccuuuuuugcagugacggcucugaccauugccuaccuugugggaagcaacaugacgcaacgagucgugauugcccuacuggucuuggcuguugguccggccuacucagcucacugcauuggaauuacugacagggauuucauugagggggugcauggaggaacuuggguuucagcuacccuggagcaagacaagugugucacuguuauggccccugacaagccuucauuggacaucucacuagagacaguagccauugauagaccugcugaggugaggaaaguguguuacaaugcaguucucacucaugugaagauuaaugacaagugccccagcacuggagaggcccaccuagcugaagagaacgaaggggacaaugcgugcaagcgcacuuauucugauagaggcuggggcaauggcuguggccuauuugggaaagggagcauuguggcaugcgccaaauucacuugugccaaauccaugaguuuguuugagguugaucagaccaaaauucaguaugucaucagagcacaauugcauguaggggccaagcaggaaaauuggaauaccgacauuaagacucucaaguuugaugcccugucaggcucccaggaagucgaguucauuggguauggaaaagcuacacuggaaugccaggugcaaacugcgguggacuuugguaacaguuacaucgcugagauggaaacagagagcuggauaguggacagacagugggcccaggacuugacccugccauggcagaguggaaguggcgggguguggagagagaugcaucaucuugucgaauuugaaccuccgcaugccgccacuaucagaguacuggcccugggaaaccaggaaggcuccuugaaaacagcucuuacuggcgcaaugaggguuacaaaggacacaaaugacaacaaccuuuacaaacuacaugguggacauguuucuugcagagugaaauugucagcuuugacacucaaggggacauccuacaaaauaugcacugacaaaauguuuuuugucaagaacccaacugacacuggccauggcacuguugugaugcaggugaaagugucaaaaggagcccccugcaggauuccagugauaguagcugaugaucuuacagcggcaaucaauaaaggcauuuugguuacaguuaaccccaucgccucaaccaaugaugaugaagugcugauugaggugaacccaccuuuuggagacagcuacauuaucguugggagaggagauucacgucucacuuaccaguggcacaaagagggaagcucaauaggcagcacgcugggcaaggccuuuucaacaacuuugaagggagcucaaagacuggcagcguugggcgacacagccugggacuuuggcucuauuggaggggucuucaacuccauaggaagagccguucaccaaguguuugguggugccuucagaacacucuuugggggaaugucuuggaucacacaagggcuaaugggugcccuacugcucuggaugggcgucaacgcacgagaccgaucaauugcuuuggccuucuuagccacaggaggugugcucguguucuuagcgaccaaugugcacgccuaaggacuaguggaagcauuuuccuggcugauuaaaagaaauuacucagcuauggucaucuguuccuguuagaaggcuaugcagcauauuauauacuaugcgcauguuaugaaaugcauaauaaaaaauuuuaaaaaaucuaaaagaucuaaaaaaaaaaaaaaaaaaaaaaaaaaaaaaaaaaaaaaaaaaaaaaaaaaaaaaaaaaaaaaaaugcaucccccccccccccccccccccccccccccccaaaggcucuuuucagagccaccagaauu

SEQ ID NO: 1811 - RNA, 2513 nt, Artificial Sequence
  mRNA product Design d-5 comprising derived and/or modified sequence from YFV__NC_002031.1__X-SS-prME (polyprotein: aa92-778) (wt)
gggagagggcgcuuggcuugcaaggacccugagcugcggcauugaagcacacccaacccaacucgacugaagucagccucacugaaccggaucugagaaucuucucucucugggcuugccagggcucuccgaaccuagcuagcauccucuucaauuccaacuagaaagcuuaccaugagaggauuguccucaaggaaacgccguucccaugauguucugacugugcaauuccuaauuuugggaaugcuguugaugacggguggagugaccuuggugcggaaaaacagaugguugcuccuaaaugugacaucugaggaccucgggaaaacauucucugugggcacaggcaacugcacaacaaacauuuuggaagccaaguacuggugcccagacucaauggaauacaacugucccaaucucaguccaagagaggagccagaugacauugauugcuggugcuaugggguggaaaacguuagagucgcauaugguaagugugacucagcaggcaggucuaggaggucaagaagggccauugacuugccuacgcaugaaaaccaugguuugaagacccggcaagaaaaauggaugacuggaagaaugggugaaaggcaacuccaaaagauugagagaugguucgugaggaaccccuuuuuugcagugacggcucugaccauugccuaccuugugggaagcaacaugacgcaacgagucgugauugcccuacuggucuuggcuguugguccggccuacucagcucacugcauuggaauuacugacagggauuucauugagggggugcauggaggaacuuggguuucagcuacccuggagcaagacaagugugucacuguuauggccccugacaagccuucauuggacaucucacuagagacaguagccauugauagaccugcugaggugaggaaaguguguuacaaugcaguucucacucaugugaagauuaaugacaagugccccagcacuggagaggcccaccuagcugaagagaacgaaggggacaaugcgugcaagcgcacuuauucugauagaggcuggggcaauggcuguggccuauuugggaaagggagcauuguggcaugcgccaaauucacuugugccaaauccaugaguuuguuugagguugaucagaccaaaauucaguaugucaucagagcacaauugcauguaggggccaagcaggaaaauuggaauaccgacauuaagacucucaaguuugaugcccugucaggcucccaggaagucgaguucauuggguauggaaaagcuacacuggaaugccaggugcaaacugcgguggacuuugguaacaguuacaucgcugagauggaaacagagagcuggauaguggacagacagugggcccaggacuugacccugccauggcagaguggaaguggcgggguguggagagagaugcaucaucuugucgaauuugaaccuccgcaugccgccacuaucagaguacuggcccugggaaaccaggaaggcuccuugaaaacagcucuuacuggcgcaaugaggguuacaaaggacacaaaugacaacaaccuuuacaaacuacaugguggacauguuucuugcagagugaaauugucagcuuugacacucaaggggacauccuacaaaauaugcacugacaaaauguuuuuugucaagaacccaacugacacuggccauggcacuguugugaugcaggugaaagugucaaaaggagcccccugcaggauuccagugauaguagcugaugaucuuacagcggcaaucaauaaaggcauuuugguuacaguuaaccccaucgccucaaccaaugaugaugaagugcugauugaggugaacccaccuuuuggagacagcuacauuaucguugggagaggagauucacgucucacuuaccaguggcacaaagagggaagcucaauaggaaaguuguucacucagaccaugaaaggcguggaacgccuggccgucaugggagacaccgccugggauuucagcuccgcuggaggguucuucacuucgguugggaaaggaauccauacgguguuuggcucugccuuucaggggcuauuuggcggcuugaacuggauaacaaaggucaucaugggggcgguacuuauauggguuggcaucaacacaagaaacaugacaauguccaugagcaugaucuugguaggagugaucaugauguuuuugucucuaggaguuggggcguaaggacuaguggaagcauuuuccuggcugauuaaaagaaauuacucagcuauggucaucuguuccuguuagaaggcuaugcagcauauuauauacuaugcgcauguuaugaaaugcauaauaaaaaauuuuaaaaaaucuaaaagaucuaaaaaaaaaaaaaaaaaaaaaaaaaaaaaaaaaaaaaaaaaaaaaaaaaaaaaaaaaaaaaaaaugcaucccccccccccccccccccccccccccccccaaaggcucuuuucagagccaccagaauu

SEQ ID NO: 1812 - RNA, 2516 nt, Artificial Sequence
  mRNA product Design d-5 comprising derived and/or modified sequence from YFV__NC_002031.1__SSjev(V3)-prME-XX (polyprotein: aa122-788) (wt)
gggagagggcgcuuggcuugcaaggacccugagcugcggcauugaagcacacccaacccaacucgacugaagucagccucacugaaccggaucugagaaucuucucucucugggcuugccagggcucuccgaaccuagcuagcauccucuucaauuccaacuagaaagcuuaccaugaaugaaggcucaaucauguggcucgcgagcuuggcaguugucauagcuugugcaggagccgugaccuuggugcggaaaaacagaugguugcuccuaaaugugacaucugaggaccucgggaaaacauucucugugggcacaggcaacugcacaacaaacauuuuggaagccaaguacuggugcccagacucaauggaauacaacugucccaaucucaguccaagagaggagccagaugacauugauugcuggugcuaugggguggaaaacguuagagucgcauaugguaagugugacucagcaggcaggucuaggaggucaagaagggccauugacuugccuacgcaugaaaaccaugguuugaagacccggcaagaaaaauggaugacuggaagaaugggugaaaggcaacuccaaaagauugagagaugguucgugaggaaccccuuuuuugcagugacggcucugaccauugccuaccuugugggaagcaacaugacgcaacgagucgugauugcccuacuggucuuggcuguugguccggccuacucagcucacugcauuggaauuacugacagggauuucauugagggggugcauggaggaacuuggguuucagcuacccuggagcaagacaagugugucacuguuauggccccugacaagccuucauuggacaucucacuagagacaguagccauugauagaccugcugaggugaggaaaguguguuacaaugcaguucucacucaugugaagauuaaugacaagugccccagcacuggagaggcccaccuagcugaagagaacgaaggggacaaugcgugcaagcgcacuuauucugauagaggcuggggcaauggcuguggccuauuugggaaagggagcauuguggcaugcgccaaauucacuugugccaaauccaugaguuuguuugagguugaucagaccaaaauucaguaugucaucagagcacaauugcauguaggggccaagcaggaaaauuggaauaccgacauuaagacucucaaguuugaugcccugucaggcucccaggaagucgaguucauuggguauggaaaagcuacacuggaaugccaggugcaaacugcgguggacuuugguaacaguuacaucgcugagauggaaacagagagcuggauaguggacagacagugggcccaggacuugacccugccauggcagaguggaaguggcgggguguggagagagaugcaucaucuugucgaauuugaaccuccgcaugccgccacuaucagaguacuggcccugggaaaccaggaaggcuccuugaaaacagcucuuacuggcgcaaugaggguuacaaaggacacaaaugacaacaaccuuuacaaacuacaugguggacauguuucuugcagagugaaauugucagcuuugacacucaaggggacauccuacaaaauaugcacugacaaaauguuuuuugucaagaacccaacugacacuggccauggcacuguugugaugcaggugaaagugucaaaaggagcccccugcaggauuccagugauaguagcugaugaucuuacagcggcaaucaauaaaggcauuuugguuacaguuaaccccaucgccucaaccaaugaugaugaagugcugauugaggugaacccaccuuuuggagacagcuacauuaucguugggagaggagauucacgucucacuuaccaguggcacaaagagggaagcucaauaggaaaguuguucacucagaccaugaaaggcguggaacgccuggccgucaugggagacaccgccugggauuucagcuccgcuggaggguucuucacuucgguugggaaaggaauccauacgguguuuggcucugccuuucaggggcuauuuggcggcuugaacuggauaacaaaggucaucaugggggcgguacuuauauggguuggcaucaacacaagaaacaugacaauguccaugagcaugaucuugguaggagugaucaugauguuuuugucucuaggaguuggggcggaucaaggaugcgccaucaacuuuggcaaguaaggacuaguggaagcauuuuccuggcugauuaaaagaaauuacucagcuauggucaucuguuccuguuagaaggcuaugcagcauauuauauacuaugcgcauguuaugaaaugcauaauaaaaaauuuuaaaaaaucuaaaagaucuaaaaaaaaaaaaaaaaaaaaaaaaaaaaaaaaaaaaaaaaaaaaaaaaaaaaaaaaaaaaaaaaugcaucccccccccccccccccccccccccccccccaaaggcucuuuucagagccaccagaauu

SEQ ID NO: 1813 - RNA, 2525 nt, Artificial Sequence
  mRNA product Design d-5 comprising derived and/or modified sequence from YFV__NC_002031.1__X-SS-prMEdelstem_TM-JEV (polyprotein: aa92-681) (opt1)
gggagagggcgcuuggcuugcaaggacccugagcugcggcauugaagcacacccaacccaacucgacugaagucagccucacugaaccggaucugagaaucuucucucucugggcuugccagggcucuccgaaccuagcuagcauccucuucaauuccaacuagaaagcuuaccaugcggggccugagcucccgcaagcggcgcagccacgacgugcucaccguccaguuccugauccuggggaugcuccugaugaccggcggggugacgcuggugcggaagaaccgcuggcuccugcugaacgucaccuccgaggaccucggcaagaccuucagcguggggaccggcaacugcacgaccaacauccuggaggccaaguacuggugccccgacuccauggaguacaacugcccgaaccugagcccccgggaggagcccgacgacaucgacugcuggugcuacggcguggagaacguccgcguggccuacgggaagugcgacuccgcgggccggagccgccggucccgccgggccaucgaccuccccacccacgagaaccacgggcugaagacccgccaggagaaguggaugacgggccggaugggggagcgccagcugcagaagaucgagcggugguucgugcgcaacccguucuucgccgucaccgcccucaccaucgccuaccuggugggcagcaacaugacccagcggguggucaucgcgcugcucgugcuggccgugggccccgccuacuccgcccacugcaucgggaucacggaccgcgacuucaucgagggcguccacgggggcaccugggugagcgcgacccuggagcaggacaagugcgugaccgucauggcccccgacaagcccucccucgacaucagccuggagacgguggccaucgaccggccggccgaggugcgcaaggucugcuacaacgccgugcugacccacgugaagaucaacgacaagugccccuccaccggcgaggcgcaccucgccgaggagaacgagggggacaacgccugcaagcggaccuacagcgaccggggcugggggaacggcugcgggcuguucggcaagggcuccaucgucgccugcgccaaguucacgugcgcgaagagcaugucccuguucgagguggaccagaccaagauccaguacgucauccgcgcccagcuccacgugggggccaagcaggagaacuggaacaccgacaucaagacccugaaguucgacgcccugagcggcagccaggagguggaguucaucggguacggcaaggccacgcucgagugccagguccagaccgcgguggacuucgggaacuccuacaucgccgagauggagaccgagagcuggaucguggaccggcagugggcccaggaccugacccugcccuggcaguccggcagcggcggggucuggcgcgagaugcaccaccucguggaguucgagcccccgcacgccgccacgauccgggugcuggcgcugggcaaccaggaggggucccucaagaccgcccugaccggcgccaugcgcgucaccaaggacacgaacgacaacaaccuguacaagcuccacgggggccacgugagcugccgggugaagcuguccgcccugacccucaagggcaccagcuacaagaucugcaccgacaagauguucuucgucaagaaccccacggacaccgggcacggcaccguggugaugcaggucaagguguccaagggggcgcccugccgcaucccggugaucgucgccgacgaccugaccgccgccaucaacaagggcauccuggugaccgugaacccgaucgccagcacgaacgacgacgagguccucaucgaggugaacccccccuucggcgacuccuacaucaucguggggcggggcgacagccgccugaccuaccaguggcacaaggagggguccagcaucggcagcacccuggggaaggccuucuccaccacgcucaagggcgcccagcgccuggcggcccugggggacaccgccugggacuucggcagcaucgggggcguguucaacuccaucggccgggccguccaccagguguucgggggcgccuuccgcacccucuucgggggcaugagcuggaucacccaggggcugaugggcgcgcugcuccuguggaugggggugaacgcccgggaccgcuccaucgcccuggccuuccucgcgacgggcggcguccugguguuccuggccaccaacgugcacgccugaggacuaguggaagcauuuuccuggcugauuaaaagaaauuacucagcuauggucaucuguuccuguuagaaggcuaugcagcauauuauauacuaugcgcauguuaugaaaugcauaauaaaaaauuuuaaaaaaucuaaaagaucuaaaaaaaaaaaaaaaaaaaaaaaaaaaaaaaaaaaaaaaaaaaaaaaaaaaaaaaaaaaaaaaaugcaucccccccccccccccccccccccccccccccaaaggcucuuuucagagccaccagaauu

SEQ ID NO: 1814 - RNA, 2498 nt, Artificial Sequence
  mRNA product Design d-5 comprising derived and/or modified sequence from YFV__NC_002031.1__SSjev(V3)-prMEdelstem_TM-JEV (polyprotein: aa122-681) (opt1)
gggagagggcgcuuggcuugcaaggacccugagcugcggcauugaagcacacccaacccaacucgacugaagucagccucacugaaccggaucugagaaucuucucucucugggcuugccagggcucuccgaaccuagcuagcauccucuucaauuccaacuagaaagcuuaccaugaacgagggcagcaucauguggcuggccucccucgccguggucaucgcgugcgccggggccgugacgcuggugcggaagaaccgcuggcuccugcugaacgucaccuccgaggaccucggcaagaccuucagcguggggaccggcaacugcacgaccaacauccuggaggccaaguacuggugccccgacuccauggaguacaacugcccgaaccugagcccccgggaggagcccgacgacaucgacugcuggugcuacggcguggagaacguccgcguggccuacgggaagugcgacuccgcgggccggagccgccggucccgccgggccaucgaccuccccacccacgagaaccacgggcugaagacccgccaggagaaguggaugacgggccggaugggggagcgccagcugcagaagaucgagcggugguucgugcgcaacccguucuucgccgucaccgcccucaccaucgccuaccuggugggcagcaacaugacccagcggguggucaucgcgcugcucgugcuggccgugggccccgccuacuccgcccacugcaucgggaucacggaccgcgacuucaucgagggcguccacgggggcaccugggugagcgcgacccuggagcaggacaagugcgugaccgucauggcccccgacaagcccucccucgacaucagccuggagacgguggccaucgaccggccggccgaggugcgcaaggucugcuacaacgccgugcugacccacgugaagaucaacgacaagugccccuccaccggcgaggcgcaccucgccgaggagaacgagggggacaacgccugcaagcggaccuacagcgaccggggcugggggaacggcugcgggcuguucggcaagggcuccaucgucgccugcgccaaguucacgugcgcgaagagcaugucccuguucgagguggaccagaccaagauccaguacgucauccgcgcccagcuccacgugggggccaagcaggagaacuggaacaccgacaucaagacccugaaguucgacgcccugagcggcagccaggagguggaguucaucggguacggcaaggccacgcucgagugccagguccagaccgcgguggacuucgggaacuccuacaucgccgagauggagaccgagagcuggaucguggaccggcagugggcccaggaccugacccugcccuggcaguccggcagcggcggggucuggcgcgagaugcaccaccucguggaguucgagcccccgcacgccgccacgauccgggugcuggcgcugggcaaccaggaggggucccucaagaccgcccugaccggcgccaugcgcgucaccaaggacacgaacgacaacaaccuguacaagcuccacgggggccacgugagcugccgggugaagcuguccgcccugacccucaagggcaccagcuacaagaucugcaccgacaagauguucuucgucaagaaccccacggacaccgggcacggcaccguggugaugcaggucaagguguccaagggggcgcccugccgcaucccggugaucgucgccgacgaccugaccgccgccaucaacaagggcauccuggugaccgugaacccgaucgccagcacgaacgacgacgagguccucaucgaggugaacccccccuucggcgacuccuacaucaucguggggcggggcgacagccgccugaccuaccaguggcacaaggagggguccagcaucggcagcacccuggggaaggccuucuccaccacgcucaagggcgcccagcgccuggcggcccugggggacaccgccugggacuucggcagcaucgggggcguguucaacuccaucggccgggccguccaccagguguucgggggcgccuuccgcacccucuucgggggcaugagcuggaucacccaggggcugaugggcgcgcugcuccuguggaugggggugaacgcccgggaccgcuccaucgcccuggccuuccucgcgacgggcggcguccugguguuccuggccaccaacgugcacgccugaggacuaguggaagcauuuuccuggcugauuaaaagaaauuacucagcuauggucaucuguuccuguuagaaggcuaugcagcauauuauauacuaugcgcauguuaugaaaugcauaauaaaaaauuuuaaaaaaucuaaaagaucuaaaaaaaaaaaaaaaaaaaaaaaaaaaaaaaaaaaaaaaaaaaaaaaaaaaaaaaaaaaaaaaaugcaucccccccccccccccccccccccccccccccaaaggcucuuuucagagccaccagaauu

SEQ ID NO: 1815 - RNA, 2513 nt, Artificial Sequence
  mRNA product Design d-5 comprising derived and/or modified sequence from YFV__NC_002031.1__X-SS-prME (polyprotein: aa92-778) (opt1)
gggagagggcgcuuggcuugcaaggacccugagcugcggcauugaagcacacccaacccaacucgacugaagucagccucacugaaccggaucugagaaucuucucucucugggcuugccagggcucuccgaaccuagcuagcauccucuucaauuccaacuagaaagcuuaccaugcggggccugagcucccgcaagcggcgcagccacgacgugcucaccguccaguuccugauccuggggaugcuccugaugaccggcggggugacgcuggugcggaagaaccgcuggcuccugcugaacgucaccuccgaggaccucggcaagaccuucagcguggggaccggcaacugcacgaccaacauccuggaggccaaguacuggugccccgacuccauggaguacaacugcccgaaccugagcccccgggaggagcccgacgacaucgacugcuggugcuacggcguggagaacguccgcguggccuacgggaagugcgacuccgcgggccggagccgccggucccgccgggccaucgaccuccccacccacgagaaccacgggcugaagacccgccaggagaaguggaugacgggccggaugggggagcgccagcugcagaagaucgagcggugguucgugcgcaacccguucuucgccgucaccgcccucaccaucgccuaccuggugggcagcaacaugacccagcggguggucaucgcgcugcucgugcuggccgugggccccgccuacuccgcccacugcaucgggaucacggaccgcgacuucaucgagggcguccacgggggcaccugggugagcgcgacccuggagcaggacaagugcgugaccgucauggcccccgacaagcccucccucgacaucagccuggagacgguggccaucgaccggccggccgaggugcgcaaggucugcuacaacgccgugcugacccacgugaagaucaacgacaagugccccuccaccggcgaggcgcaccucgccgaggagaacgagggggacaacgccugcaagcggaccuacagcgaccggggcugggggaacggcugcgggcuguucggcaagggcuccaucgucgccugcgccaaguucacgugcgcgaagagcaugucccuguucgagguggaccagaccaagauccaguacgucauccgcgcccagcuccacgugggggccaagcaggagaacuggaacaccgacaucaagacccugaaguucgacgcccugagcggcagccaggagguggaguucaucggguacggcaaggccacgcucgagugccagguccagaccgcgguggacuucgggaacuccuacaucgccgagauggagaccgagagcuggaucguggaccggcagugggcccaggaccugacccugcccuggcaguccggcagcggcggggucuggcgcgagaugcaccaccucguggaguucgagcccccgcacgccgccacgauccgggugcuggcgcugggcaaccaggaggggucccucaagaccgcccugaccggcgccaugcgcgucaccaaggacacgaacgacaacaaccuguacaagcuccacgggggccacgugagcugccgggugaagcuguccgcccugacccucaagggcaccagcuacaagaucugcaccgacaagauguucuucgucaagaaccccacggacaccgggcacggcaccguggugaugcaggucaagguguccaagggggcgcccugccgcaucccggugaucgucgccgacgaccugaccgccgccaucaacaagggcauccuggugaccgugaacccgaucgccagcacgaacgacgacgagguccucaucgaggugaacccccccuucggcgacuccuacaucaucguggggcggggcgacagccgccugaccuaccaguggcacaaggagggguccagcaucggcaagcuguucacccagaccaugaagggggucgagcggcuggcggugaugggcgacacggccugggacuucuccagcgccggcggguucuucaccuccgugggcaaggggauccacaccgucuucggcagcgccuuccaggggcucuucggcggccugaacuggaucaccaaggugaucaugggggccgugcugaucugggucggcaucaacacgcgcaacaugaccauguccaugagcaugauccucgugggggugaucaugauguuccugagccugggcgucggggcgugaggacuaguggaagcauuuuccuggcugauuaaaagaaauuacucagcuauggucaucuguuccuguuagaaggcuaugcagcauauuauauacuaugcgcauguuaugaaaugcauaauaaaaaauuuuaaaaaaucuaaaagaucuaaaaaaaaaaaaaaaaaaaaaaaaaaaaaaaaaaaaaaaaaaaaaaaaaaaaaaaaaaaaaaaaugcaucccccccccccccccccccccccccccccccaaaggcucuuuucagagccaccagaauu

SEQ ID NO: 1816 - RNA, 2516 nt, Artificial Sequence
  mRNA product Design d-5 comprising derived and/or modified sequence from YFV__NC_002031.1__SSjev(V3)-prME-XX (polyprotein: aa122-788) (opt1)
gggagagggcgcuuggcuugcaaggacccugagcugcggcauugaagcacacccaacccaacucgacugaagucagccucacugaaccggaucugagaaucuucucucucugggcuugccagggcucuccgaaccuagcuagcauccucuucaauuccaacuagaaagcuuaccaugaacgagggcagcaucauguggcuggccucccucgccguggucaucgcgugcgccggggccgugacgcuggugcggaagaaccgcuggcuccugcugaacgucaccuccgaggaccucggcaagaccuucagcguggggaccggcaacugcacgaccaacauccuggaggccaaguacuggugccccgacuccauggaguacaacugcccgaaccugagcccccgggaggagcccgacgacaucgacugcuggugcuacggcguggagaacguccgcguggccuacgggaagugcgacuccgcgggccggagccgccggucccgccgggccaucgaccuccccacccacgagaaccacgggcugaagacccgccaggagaaguggaugacgggccggaugggggagcgccagcugcagaagaucgagcggugguucgugcgcaacccguucuucgccgucaccgcccucaccaucgccuaccuggugggcagcaacaugacccagcggguggucaucgcgcugcucgugcuggccgugggccccgccuacuccgcccacugcaucgggaucacggaccgcgacuucaucgagggcguccacgggggcaccugggugagcgcgacccuggagcaggacaagugcgugaccgucauggcccccgacaagcccucccucgacaucagccuggagacgguggccaucgaccggccggccgaggugcgcaaggucugcuacaacgccgugcugacccacgugaagaucaacgacaagugccccuccaccggcgaggcgcaccucgccgaggagaacgagggggacaacgccugcaagcggaccuacagcgaccggggcugggggaacggcugcgggcuguucggcaagggcuccaucgucgccugcgccaaguucacgugcgcgaagagcaugucccuguucgagguggaccagaccaagauccaguacgucauccgcgcccagcuccacgugggggccaagcaggagaacuggaacaccgacaucaagacccugaaguucgacgcccugagcggcagccaggagguggaguucaucggguacggcaaggccacgcucgagugccagguccagaccgcgguggacuucgggaacuccuacaucgccgagauggagaccgagagcuggaucguggaccggcagugggcccaggaccugacccugcccuggcaguccggcagcggcggggucuggcgcgagaugcaccaccucguggaguucgagcccccgcacgccgccacgauccgggugcuggcgcugggcaaccaggaggggucccucaagaccgcccugaccggcgccaugcgcgucaccaaggacacgaacgacaacaaccuguacaagcuccacgggggccacgugagcugccgggugaagcuguccgcccugacccucaagggcaccagcuacaagaucugcaccgacaagauguucuucgucaagaaccccacggacaccgggcacggcaccguggugaugcaggucaagguguccaagggggcgcccugccgcaucccggugaucgucgccgacgaccugaccgccgccaucaacaagggcauccuggugaccgugaacccgaucgccagcacgaacgacgacgagguccucaucgaggugaacccccccuucggcgacuccuacaucaucguggggcggggcgacagccgccugaccuaccaguggcacaaggagggguccagcaucggcaagcuguucacccagaccaugaagggggucgagcggcuggcggugaugggcgacacggccugggacuucuccagcgccggcggguucuucaccuccgugggcaaggggauccacaccgucuucggcagcgccuuccaggggcucuucggcggccugaacuggaucaccaaggugaucaugggggccgugcugaucugggucggcaucaacacgcgcaacaugaccauguccaugagcaugauccucgugggggugaucaugauguuccugagccugggcgucggggcggaccagggcugcgccaucaacuucggcaagugaggacuaguggaagcauuuuccuggcugauuaaaagaaauuacucagcuauggucaucuguuccuguuagaaggcuaugcagcauauuauauacuaugcgcauguuaugaaaugcauaauaaaaaauuuuaaaaaaucuaaaagaucuaaaaaaaaaaaaaaaaaaaaaaaaaaaaaaaaaaaaaaaaaaaaaaaaaaaaaaaaaaaaaaaaugcaucccccccccccccccccccccccccccccccaaaggcucuuuucagagccaccagaauu

SEQ ID NO: 1817 - RNA, 2525 nt, Artificial Sequence
  mRNA product Design d-5 comprising derived and/or modified sequence from YFV__NC_002031.1__X-SS-prMEdelstem_TM-JEV (polyprotein: aa92-681) (opt1)
gggagagggcgcuuggcuugcaaggacccugagcugcggcauugaagcacacccaacccaacucgacugaagucagccucacugaaccggaucugagaaucuucucucucugggcuugccagggcucuccgaaccuagcuagcauccucuucaauuccaacuagaaagcuuaccaugcggggccugagcucccgcaagcggcgcagccacgacgugcucaccguccaguuccugauccuggggaugcuccugaugaccggcggggugacgcuggugcggaagaaccgcuggcuccugcugaacgucaccuccgaggaccucggcaagaccuucagcguggggaccggcaacugcacgaccaacauccuggaggccaaguacuggugccccgacuccauggaguacaacugcccgaaccugagcccccgggaggagcccgacgacaucgacugcuggugcuacggcguggagaacguccgcguggccuacgggaagugcgacuccgcgggccggagccgccggucccgccgggccaucgaccuccccacccacgagaaccacgggcugaagacccgccaggagaaguggaugacgggccggaugggggagcgccagcugcagaagaucgagcggugguucgugcgcaacccguucuucgccgucaccgcccucaccaucgccuaccuggugggcagcaacaugacccagcggguggucaucgcgcugcucgugcuggccgugggccccgccuacuccgcccacugcaucgggaucacggaccgcgacuucaucgagggcguccacgggggcaccugggugagcgcgacccuggagcaggacaagugcgugaccgucauggcccccgacaagcccucccucgacaucagccuggagacgguggccaucgaccggccggccgaggugcgcaaggucugcuacaacgccgugcugacccacgugaagaucaacgacaagugccccuccaccggcgaggcgcaccucgccgaggagaacgagggggacaacgccugcaagcggaccuacagcgaccggggcugggggaacggcugcgggcuguucggcaagggcuccaucgucgccugcgccaaguucacgugcgcgaaguccaugagccuguucgagguggaccagaccaagauccaguacgucauccgcgcccagcuccacgugggggccaagcaggagaacuggaacaccgacaucaagacccugaaguucgacgcccugagcggcagccaggagguggaguucaucggguacggcaaggccacgcucgagugccagguccagaccgcgguggacuucgggaacuccuacaucgccgagauggagaccgagagcuggaucguggaccggcagugggcccaggaccugacccugcccuggcaguccggcagcggcggggucuggcgcgagaugcaccaccucguggaguucgagcccccgcacgccgccacgauccgggugcuggcgcugggcaaccaggaggggucccucaagaccgcccugaccggcgccaugcgcgucaccaaggacacgaacgacaacaaccuguacaagcuccacgggggccacgugagcugccgggugaagcuguccgcccugacccucaagggcaccagcuacaagaucugcaccgacaagauguucuucgucaagaaccccacggacaccgggcacggcaccguggugaugcaggucaagguguccaagggggcgcccugccgcaucccggugaucgucgccgacgaccugaccgccgccaucaacaagggcauccuggugaccgugaacccgaucgccagcacgaacgacgacgagguccucaucgaggugaacccccccuucggcgacuccuacaucaucguggggcggggcgacagccgccugaccuaccaguggcacaaggagggguccagcaucggcagcacccuggggaaggccuucuccaccacgcucaagggcgcccagcgccuggcggcccugggggacaccgccugggacuucggcagcaucgggggcguguucaacuccaucggccgggccguccaccagguguucgggggcgccuuccgcacccucuucgggggcaugagcuggaucacccaggggcugaugggcgcgcugcuccuguggaugggggugaacgcccgggaccgcuccaucgcccuggccuuccucgcgacgggcggcguccugguguuccuggccaccaacgugcacgccugaggacuaguggaagcauuuuccuggcugauuaaaagaaauuacucagcuauggucaucuguuccuguuagaaggcuaugcagcauauuauauacuaugcgcauguuaugaaaugcauaauaaaaaauuuuaaaaaaucuaaaagaucuaaaaaaaaaaaaaaaaaaaaaaaaaaaaaaaaaaaaaaaaaaaaaaaaaaaaaaaaaaaaaaaaugcaucccccccccccccccccccccccccccccccaaaggcucuuuucagagccaccagaauu

SEQ ID NO: 1818 - RNA, 2498 nt, Artificial Sequence
  mRNA product Design d-5 comprising derived and/or modified sequence from YFV__NC_002031.1__SSjev(V3)-prMEdelstem_TM-JEV (polyprotein: aa122-681) (opt1)
gggagagggcgcuuggcuugcaaggacccugagcugcggcauugaagcacacccaacccaacucgacugaagucagccucacugaaccggaucugagaaucuucucucucugggcuugccagggcucuccgaaccuagcuagcauccucuucaauuccaacuagaaagcuuaccaugaacgagggcagcaucauguggcuggccucccucgccguggucaucgcgugcgccggggccgugacgcuggugcggaagaaccgcuggcuccugcugaacgucaccuccgaggaccucggcaagaccuucagcguggggaccggcaacugcacgaccaacauccuggaggccaaguacuggugccccgacuccauggaguacaacugcccgaaccugagcccccgggaggagcccgacgacaucgacugcuggugcuacggcguggagaacguccgcguggccuacgggaagugcgacuccgcgggccggagccgccggucccgccgggccaucgaccuccccacccacgagaaccacgggcugaagacccgccaggagaaguggaugacgggccggaugggggagcgccagcugcagaagaucgagcggugguucgugcgcaacccguucuucgccgucaccgcccucaccaucgccuaccuggugggcagcaacaugacccagcggguggucaucgcgcugcucgugcuggccgugggccccgccuacuccgcccacugcaucgggaucacggaccgcgacuucaucgagggcguccacgggggcaccugggugagcgcgacccuggagcaggacaagugcgugaccgucauggcccccgacaagcccucccucgacaucagccuggagacgguggccaucgaccggccggccgaggugcgcaaggucugcuacaacgccgugcugacccacgugaagaucaacgacaagugccccuccaccggcgaggcgcaccucgccgaggagaacgagggggacaacgccugcaagcggaccuacagcgaccggggcugggggaacggcugcgggcuguucggcaagggcuccaucgucgccugcgccaaguucacgugcgcgaaguccaugagccuguucgagguggaccagaccaagauccaguacgucauccgcgcccagcuccacgugggggccaagcaggagaacuggaacaccgacaucaagacccugaaguucgacgcccugagcggcagccaggagguggaguucaucggguacggcaaggccacgcucgagugccagguccagaccgcgguggacuucgggaacuccuacaucgccgagauggagaccgagagcuggaucguggaccggcagugggcccaggaccugacccugcccuggcaguccggcagcggcggggucuggcgcgagaugcaccaccucguggaguucgagcccccgcacgccgccacgauccgggugcuggcgcugggcaaccaggaggggucccucaagaccgcccugaccggcgccaugcgcgucaccaaggacacgaacgacaacaaccuguacaagcuccacgggggccacgugagcugccgggugaagcuguccgcccugacccucaagggcaccagcuacaagaucugcaccgacaagauguucuucgucaagaaccccacggacaccgggcacggcaccguggugaugcaggucaagguguccaagggggcgcccugccgcaucccggugaucgucgccgacgaccugaccgccgccaucaacaagggcauccuggugaccgugaacccgaucgccagcacgaacgacgacgagguccucaucgaggugaacccccccuucggcgacuccuacaucaucguggggcggggcgacagccgccugaccuaccaguggcacaaggagggguccagcaucggcagcacccuggggaaggccuucuccaccacgcucaagggcgcccagcgccuggcggcccugggggacaccgccugggacuucggcagcaucgggggcguguucaacuccaucggccgggccguccaccagguguucgggggcgccuuccgcacccucuucgggggcaugagcuggaucacccaggggcugaugggcgcgcugcuccuguggaugggggugaacgcccgggaccgcuccaucgcccuggccuuccucgcgacgggcggcguccugguguuccuggccaccaacgugcacgccugaggacuaguggaagcauuuuccuggcugauuaaaagaaauuacucagcuauggucaucuguuccuguuagaaggcuaugcagcauauuauauacuaugcgcauguuaugaaaugcauaauaaaaaauuuuaaaaaaucuaaaagaucuaaaaaaaaaaaaaaaaaaaaaaaaaaaaaaaaaaaaaaaaaaaaaaaaaaaaaaaaaaaaaaaaugcaucccccccccccccccccccccccccccccccaaaggcucuuuucagagccaccagaauu

SEQ ID NO: 1819 - RNA, 2513 nt, Artificial Sequence
  mRNA product Design d-5 comprising derived and/or modified sequence from YFV__NC_002031.1__X-SS-prME (polyprotein: aa92-778) (opt1)
gggagagggcgcuuggcuugcaaggacccugagcugcggcauugaagcacacccaacccaacucgacugaagucagccucacugaaccggaucugagaaucuucucucucugggcuugccagggcucuccgaaccuagcuagcauccucuucaauuccaacuagaaagcuuaccaugcggggccugagcucccgcaagcggcgcagccacgacgugcucaccguccaguuccugauccuggggaugcuccugaugaccggcggggugacgcuggugcggaagaaccgcuggcuccugcugaacgucaccuccgaggaccucggcaagaccuucagcguggggaccggcaacugcacgaccaacauccuggaggccaaguacuggugccccgacuccauggaguacaacugcccgaaccugagcccccgggaggagcccgacgacaucgacugcuggugcuacggcguggagaacguccgcguggccuacgggaagugcgacuccgcgggccggagccgccggucccgccgggccaucgaccuccccacccacgagaaccacgggcugaagacccgccaggagaaguggaugacgggccggaugggggagcgccagcugcagaagaucgagcggugguucgugcgcaacccguucuucgccgucaccgcccucaccaucgccuaccuggugggcagcaacaugacccagcggguggucaucgcgcugcucgugcuggccgugggccccgccuacuccgcccacugcaucgggaucacggaccgcgacuucaucgagggcguccacgggggcaccugggugagcgcgacccuggagcaggacaagugcgugaccgucauggcccccgacaagcccucccucgacaucagccuggagacgguggccaucgaccggccggccgaggugcgcaaggucugcuacaacgccgugcugacccacgugaagaucaacgacaagugccccuccaccggcgaggcgcaccucgccgaggagaacgagggggacaacgccugcaagcggaccuacagcgaccggggcugggggaacggcugcgggcuguucggcaagggcuccaucgucgccugcgccaaguucacgugcgcgaaguccaugagccuguucgagguggaccagaccaagauccaguacgucauccgcgcccagcuccacgugggggccaagcaggagaacuggaacaccgacaucaagacccugaaguucgacgcccugagcggcagccaggagguggaguucaucggguacggcaaggccacgcucgagugccagguccagaccgcgguggacuucgggaacuccuacaucgccgagauggagaccgagagcuggaucguggaccggcagugggcccaggaccugacccugcccuggcaguccggcagcggcggggucuggcgcgagaugcaccaccucguggaguucgagcccccgcacgccgccacgauccgggugcuggcgcugggcaaccaggaggggucccucaagaccgcccugaccggcgccaugcgcgucaccaaggacacgaacgacaacaaccuguacaagcuccacgggggccacgugagcugccgggugaagcuguccgcccugacccucaagggcaccagcuacaagaucugcaccgacaagauguucuucgucaagaaccccacggacaccgggcacggcaccguggugaugcaggucaagguguccaagggggcgcccugccgcaucccggugaucgucgccgacgaccugaccgccgccaucaacaagggcauccuggugaccgugaacccgaucgccagcacgaacgacgacgagguccucaucgaggugaacccccccuucggcgacuccuacaucaucguggggcggggcgacagccgccugaccuaccaguggcacaaggagggguccagcaucggcaagcuguucacccagaccaugaagggggucgagcggcuggcggugaugggcgacacggccugggacuucuccagcgccggcggguucuucaccuccgugggcaaggggauccacaccgucuucggcagcgccuuccaggggcuguucggcggccucaacuggaucaccaaggugaucaugggggccgugcugaucugggucggcaucaacacgcgcaacaugaccauguccaugagcaugauccucgugggggugaucaugauguuccugagccugggcgucggggcgugaggacuaguggaagcauuuuccuggcugauuaaaagaaauuacucagcuauggucaucuguuccuguuagaaggcuaugcagcauauuauauacuaugcgcauguuaugaaaugcauaauaaaaaauuuuaaaaaaucuaaaagaucuaaaaaaaaaaaaaaaaaaaaaaaaaaaaaaaaaaaaaaaaaaaaaaaaaaaaaaaaaaaaaaaaugcaucccccccccccccccccccccccccccccccaaaggcucuuuucagagccaccagaauu

SEQ ID NO: 1820 - RNA, 2516 nt, Artificial Sequence
  mRNA product Design d-5 comprising derived and/or modified sequence from YFV__NC_002031.1__SSjev(V3)-prME-XX (polyprotein: aa122-788) (opt1)
gggagagggcgcuuggcuugcaaggacccugagcugcggcauugaagcacacccaacccaacucgacugaagucagccucacugaaccggaucugagaaucuucucucucugggcuugccagggcucuccgaaccuagcuagcauccucuucaauuccaacuagaaagcuuaccaugaacgagggcagcaucauguggcuggccucccucgccguggucaucgcgugcgccggggccgugacgcuggugcggaagaaccgcuggcuccugcugaacgucaccuccgaggaccucggcaagaccuucagcguggggaccggcaacugcacgaccaacauccuggaggccaaguacuggugccccgacuccauggaguacaacugcccgaaccugagcccccgggaggagcccgacgacaucgacugcuggugcuacggcguggagaacguccgcguggccuacgggaagugcgacuccgcgggccggagccgccggucccgccgggccaucgaccuccccacccacgagaaccacgggcugaagacccgccaggagaaguggaugacgggccggaugggggagcgccagcugcagaagaucgagcggugguucgugcgcaacccguucuucgccgucaccgcccucaccaucgccuaccuggugggcagcaacaugacccagcggguggucaucgcgcugcucgugcuggccgugggccccgccuacuccgcccacugcaucgggaucacggaccgcgacuucaucgagggcguccacgggggcaccugggugagcgcgacccuggagcaggacaagugcgugaccgucauggcccccgacaagcccucccucgacaucagccuggagacgguggccaucgaccggccggccgaggugcgcaaggucugcuacaacgccgugcugacccacgugaagaucaacgacaagugccccuccaccggcgaggcgcaccucgccgaggagaacgagggggacaacgccugcaagcggaccuacagcgaccggggcugggggaacggcugcgggcuguucggcaagggcuccaucgucgccugcgccaaguucacgugcgcgaaguccaugagccuguucgagguggaccagaccaagauccaguacgucauccgcgcccagcuccacgugggggccaagcaggagaacuggaacaccgacaucaagacccugaaguucgacgcccugagcggcagccaggagguggaguucaucggguacggcaaggccacgcucgagugccagguccagaccgcgguggacuucgggaacuccuacaucgccgagauggagaccgagagcuggaucguggaccggcagugggcccaggaccugacccugcccuggcaguccggcagcggcggggucuggcgcgagaugcaccaccucguggaguucgagcccccgcacgccgccacgauccgggugcuggcgcugggcaaccaggaggggucccucaagaccgcccugaccggcgccaugcgcgucaccaaggacacgaacgacaacaaccuguacaagcuccacgggggccacgugagcugccgggugaagcuguccgcccugacccucaagggcaccagcuacaagaucugcaccgacaagauguucuucgucaagaaccccacggacaccgggcacggcaccguggugaugcaggucaagguguccaagggggcgcccugccgcaucccggugaucgucgccgacgaccugaccgccgccaucaacaagggcauccuggugaccgugaacccgaucgccagcacgaacgacgacgagguccucaucgaggugaacccccccuucggcgacuccuacaucaucguggggcggggcgacagccgccugaccuaccaguggcacaaggagggguccagcaucggcaagcuguucacccagaccaugaagggggucgagcggcuggcggugaugggcgacacggccugggacuucuccagcgccggcggguucuucaccuccgugggcaaggggauccacaccgucuucggcagcgccuuccaggggcuguucggcggccucaacuggaucaccaaggugaucaugggggccgugcugaucugggucggcaucaacacgcgcaacaugaccauguccaugagcaugauccucgugggggugaucaugauguuccugagccugggcgucggggcggaccagggcugcgccaucaacuucggcaagugaggacuaguggaagcauuuuccuggcugauuaaaagaaauuacucagcuauggucaucuguuccuguuagaaggcuaugcagcauauuauauacuaugcgcauguuaugaaaugcauaauaaaaaauuuuaaaaaaucuaaaagaucuaaaaaaaaaaaaaaaaaaaaaaaaaaaaaaaaaaaaaaaaaaaaaaaaaaaaaaaaaaaaaaaaugcaucccccccccccccccccccccccccccccccaaaggcucuuuucagagccaccagaauu

SEQ ID NO: 1821 - RNA, 2525 nt, Artificial Sequence
  mRNA product Design d-5 comprising derived and/or modified sequence from YFV__NC_002031.1__X-SS-prMEdelstem_TM-JEV (polyprotein: aa92-681) (opt1)
gggagagggcgcuuggcuugcaaggacccugagcugcggcauugaagcacacccaacccaacucgacugaagucagccucacugaaccggaucugagaaucuucucucucugggcuugccagggcucuccgaaccuagcuagcauccucuucaauuccaacuagaaagcuuaccaugcggggccugagcucccgcaagcggcgcagccacgacgugcucaccguccaguuccugauccuggggaugcuccugaugaccggcggggugacgcuggugcggaagaaccgcuggcuccugcugaacgucaccuccgaggaccucggcaagaccuucagcguggggaccggcaacugcacgaccaacauccuggaggccaaguacuggugccccgacuccauggaguacaacugccccaaccugagcccccgggaggagcccgacgacaucgacugcuggugcuacggcguggagaacguccgcguggccuacgggaagugcgacuccgcgggccggagccgccggucccgccgggccaucgaccuccccacccacgagaaccacgggcugaagacccgccaggagaaguggaugacgggccggaugggggagcgccagcugcagaagaucgagcggugguucgugcgcaacccguucuucgccgucaccgcccucaccaucgccuaccuggugggcagcaacaugacccagcggguggucaucgcgcugcucgugcuggccgugggccccgccuacuccgcccacugcaucgggaucacggaccgcgacuucaucgagggcguccacgggggcaccugggugagcgcgacccuggagcaggacaagugcgugaccgucauggcccccgacaagcccucccucgacaucagccuggagacgguggccaucgaccggccggccgaggugcgcaaggucugcuacaacgccgugcugacccacgugaagaucaacgacaagugccccuccaccggcgaggcgcaccucgccgaggagaacgagggggacaacgccugcaagcggaccuacagcgaccggggcugggggaacggcugcgggcuguucggcaagggcuccaucgucgccugcgccaaguucacgugcgcgaaguccaugagccuguucgagguggaccagaccaagauccaguacgucauccgcgcccagcuccacgugggggccaagcaggagaacuggaacaccgacaucaagacccugaaguucgacgcccugagcggcagccaggagguggaguucaucggguacggcaaggccacgcucgagugccagguccagaccgcgguggacuucgggaacuccuacaucgccgagauggagaccgagagcuggaucguggaccggcagugggcccaggaccugacccugcccuggcaguccggcagcggcggggucuggcgcgagaugcaccaccucguggaguucgagcccccgcacgccgccacgauccgggugcuggcgcugggcaaccaggaggggucccucaagaccgcccugaccggcgccaugcgcgucaccaaggacacgaacgacaacaaccuguacaagcuccacgggggccacgugagcugccgggugaagcuguccgcccugacccucaagggcaccagcuacaagaucugcaccgacaagauguucuucgucaagaaccccacggacaccgggcacggcaccguggugaugcaggucaagguguccaagggggcgcccugccgcaucccggugaucgucgccgacgaccugaccgccgccaucaacaagggcauccuggugaccgugaacccgaucgccagcacgaacgacgacgagguccucaucgaggugaacccgcccuucggcgacuccuacaucaucguggggcggggcgacagccgccugaccuaccaguggcacaaggagggguccagcaucggaagcacgcugggcaaggccuuuucaacaacuuugaagggagcucaaagacuggcagcguugggcgacacagccugggacuuuggcucuauuggaggggucuucaacuccauagguagagccguucaccaaguguuuggaggugccuucagaacacucuuugggggaaugucuuggaucacacaagggcuaaugggugcccuacugcucuggaugggcgucaacgcacgagaccgaucaauugcuuuggccuucuuagccacaggaggugugcucguguucuuagcgaccaaugugcacgccugaggacuaguggaagcauuuuccuggcugauuaaaagaaauuacucagcuauggucaucuguuccuguuagaaggcuaugcagcauauuauauacuaugcgcauguuaugaaaugcauaauaaaaaauuuuaaaaaaucuaaaagaucuaaaaaaaaaaaaaaaaaaaaaaaaaaaaaaaaaaaaaaaaaaaaaaaaaaaaaaaaaaaaaaaaugcaucccccccccccccccccccccccccccccccaaaggcucuuuucagagccaccagaauu

SEQ ID NO: 1822 - RNA, 2498 nt, Artificial Sequence
  mRNA product Design d-5 comprising derived and/or modified sequence from YFV__NC_002031.1__SSjev(V3)-prMEdelstem_TM-JEV (polyprotein: aa122-681) (opt1)
gggagagggcgcuuggcuugcaaggacccugagcugcggcauugaagcacacccaacccaacucgacugaagucagccucacugaaccggaucugagaaucuucucucucugggcuugccagggcucuccgaaccuagcuagcauccucuucaauuccaacuagaaagcuuaccaugaacgagggcagcaucauguggcuggccucccucgccguggucaucgcgugcgccggggccgugacgcuggugcggaagaaccgcuggcuccugcugaacgucaccuccgaggaccucggcaagaccuucagcguggggaccggcaacugcacgaccaacauccuggaggccaaguacuggugccccgacuccauggaguacaacugccccaaccugagcccccgggaggagcccgacgacaucgacugcuggugcuacggcguggagaacguccgcguggccuacgggaagugcgacuccgcgggccggagccgccggucccgccgggccaucgaccuccccacccacgagaaccacgggcugaagacccgccaggagaaguggaugacgggccggaugggggagcgccagcugcagaagaucgagcggugguucgugcgcaacccguucuucgccgucaccgcccucaccaucgccuaccuggugggcagcaacaugacccagcggguggucaucgcgcugcucgugcuggccgugggccccgccuacuccgcccacugcaucgggaucacggaccgcgacuucaucgagggcguccacgggggcaccugggugagcgcgacccuggagcaggacaagugcgugaccgucauggcccccgacaagcccucccucgacaucagccuggagacgguggccaucgaccggccggccgaggugcgcaaggucugcuacaacgccgugcugacccacgugaagaucaacgacaagugccccuccaccggcgaggcgcaccucgccgaggagaacgagggggacaacgccugcaagcggaccuacagcgaccggggcugggggaacggcugcgggcuguucggcaagggcuccaucgucgccugcgccaaguucacgugcgcgaaguccaugagccuguucgagguggaccagaccaagauccaguacgucauccgcgcccagcuccacgugggggccaagcaggagaacuggaacaccgacaucaagacccugaaguucgacgcccugagcggcagccaggagguggaguucaucggguacggcaaggccacgcucgagugccagguccagaccgcgguggacuucgggaacuccuacaucgccgagauggagaccgagagcuggaucguggaccggcagugggcccaggaccugacccugcccuggcaguccggcagcggcggggucuggcgcgagaugcaccaccucguggaguucgagcccccgcacgccgccacgauccgggugcuggcgcugggcaaccaggaggggucccucaagaccgcccugaccggcgccaugcgcgucaccaaggacacgaacgacaacaaccuguacaagcuccacgggggccacgugagcugccgggugaagcuguccgcccugacccucaagggcaccagcuacaagaucugcaccgacaagauguucuucgucaagaaccccacggacaccgggcacggcaccguggugaugcaggucaagguguccaagggggcgcccugccgcaucccggugaucgucgccgacgaccugaccgccgccaucaacaagggcauccuggugaccgugaacccgaucgccagcacgaacgacgacgagguccucaucgaggugaacccgcccuucggcgacuccuacaucaucguggggcggggcgacagccgccugaccuaccaguggcacaaggagggguccagcaucggcagcacccuggggaaggccuucuccaccacgcucaagggcgcccagcgccuggcggcccugggggacaccgccugggacuucggcagcaucgggggcguguucaacuccaucggccgggccguccaccagguguucgggggcgccuuccgcacccucuucgggggcaugagcuggaucacccaggggcugaugggcgcgcugcuccuguggaugggggugaacgcccgggaccgcuccaucgcccuggccuuccucgcgacgggcggcguccugguguuccuggccaccaacgugcacgccugaggacuaguggaagcauuuuccuggcugauuaaaagaaauuacucagcuauggucaucuguuccuguuagaaggcuaugcagcauauuauauacuaugcgcauguuaugaaaugcauaauaaaaaauuuuaaaaaaucuaaaagaucuaaaaaaaaaaaaaaaaaaaaaaaaaaaaaaaaaaaaaaaaaaaaaaaaaaaaaaaaaaaaaaaaugcaucccccccccccccccccccccccccccccccaaaggcucuuuucagagccaccagaauu

SEQ ID NO: 1823 - RNA, 2513 nt, Artificial Sequence
  mRNA product Design d-5 comprising derived and/or modified sequence from YFV__NC_002031.1__X-SS-prME (polyprotein: aa92-778) (opt1)
gggagagggcgcuuggcuugcaaggacccugagcugcggcauugaagcacacccaacccaacucgacugaagucagccucacugaaccggaucugagaaucuucucucucugggcuugccagggcucuccgaaccuagcuagcauccucuucaauuccaacuagaaagcuuaccaugcggggccugagcucccgcaagcggcgcagccacgacgugcucaccguccaguuccugauccuggggaugcuccugaugaccggcggggugacgcuggugcggaagaaccgcuggcuccugcugaacgucaccuccgaggaccucggcaagaccuucagcguggggaccggcaacugcacgaccaacauccuggaggccaaguacuggugccccgacuccauggaguacaacugccccaaccugagcccccgggaggagcccgacgacaucgacugcuggugcuacggcguggagaacguccgcguggccuacgggaagugcgacuccgcgggccggagccgccggucccgccgggccaucgaccuccccacccacgagaaccacgggcugaagacccgccaggagaaguggaugacgggccggaugggggagcgccagcugcagaagaucgagcggugguucgugcgcaacccguucuucgccgucaccgcccucaccaucgccuaccuggugggcagcaacaugacccagcggguggucaucgcgcugcucgugcuggccgugggccccgccuacuccgcccacugcaucgggaucacggaccgcgacuucaucgagggcguccacgggggcaccugggugagcgcgacccuggagcaggacaagugcgugaccgucauggcccccgacaagcccucccucgacaucagccuggagacgguggccaucgaccggccggccgaggugcgcaaggucugcuacaacgccgugcugacccacgugaagaucaacgacaagugccccuccaccggcgaggcgcaccucgccgaggagaacgagggggacaacgccugcaagcggaccuacagcgaccggggcugggggaacggcugcgggcuguucggcaagggcuccaucgucgccugcgccaaguucacgugcgcgaaguccaugagccuguucgagguggaccagaccaagauccaguacgucauccgcgcccagcuccacgugggggccaagcaggagaacuggaacaccgacaucaagacccugaaguucgacgcccugagcggcagccaggagguggaguucaucggguacggcaaggccacgcucgagugccagguccagaccgcgguggacuucgggaacuccuacaucgccgagauggagaccgagagcuggaucguggaccggcagugggcccaggaccugacccugcccuggcaguccggcagcggcggggucuggcgcgagaugcaccaccucguggaguucgagcccccgcacgccgccacgauccgggugcuggcgcugggcaaccaggaggggucccucaagaccgcccugaccggcgccaugcgcgucaccaaggacacgaacgacaacaaccuguacaagcuccacgggggccacgugagcugccgggugaagcuguccgcccugacccucaagggcaccagcuacaagaucugcaccgacaagauguucuucgucaagaaccccacggacaccgggcacggcaccguggugaugcaggucaagguguccaagggggcgcccugccgcaucccggugaucgucgccgacgaccugaccgccgccaucaacaagggcauccuggugaccgugaacccgaucgccagcacgaacgacgacgagguccucaucgaggugaacccgcccuucggcgacuccuacaucaucguggggcggggcgacagccgccugaccuaccaguggcacaaggagggguccagcaucggcaagcuguucacccagaccaugaagggggucgagcggcuggcggugaugggcgacacggccugggacuucuccagcgccggcggguucuucaccuccgugggcaaggggauccacaccgucuucggcagcgccuuccaggggcuguucggcggccucaacuggaucaccaaggugaucaugggggccgugcugaucugggucggcaucaacacgcgcaacaugaccauguccaugagcaugauccucgugggggugaucaugauguuccugagccugggcgucggggcgugaggacuaguggaagcauuuuccuggcugauuaaaagaaauuacucagcuauggucaucuguuccuguuagaaggcuaugcagcauauuauauacuaugcgcauguuaugaaaugcauaauaaaaaauuuuaaaaaaucuaaaagaucuaaaaaaaaaaaaaaaaaaaaaaaaaaaaaaaaaaaaaaaaaaaaaaaaaaaaaaaaaaaaaaaaugcaucccccccccccccccccccccccccccccccaaaggcucuuuucagagccaccagaauu

SEQ ID NO: 1824 - RNA, 2516 nt, Artificial Sequence
  mRNA product Design d-5 comprising derived and/or modified sequence from YFV__NC_002031.1__SSjev(V3)-prME-XX (polyprotein: aa122-788) (opt1)
gggagagggcgcuuggcuugcaaggacccugagcugcggcauugaagcacacccaacccaacucgacugaagucagccucacugaaccggaucugagaaucuucucucucugggcuugccagggcucuccgaaccuagcuagcauccucuucaauuccaacuagaaagcuuaccaugaacgagggcagcaucauguggcuggccucccucgccguggucaucgcgugcgccggggccgugacgcuggugcggaagaaccgcuggcuccugcugaacgucaccuccgaggaccucggcaagaccuucagcguggggaccggcaacugcacgaccaacauccuggaggccaaguacuggugccccgacuccauggaguacaacugccccaaccugagcccccgggaggagcccgacgacaucgacugcuggugcuacggcguggagaacguccgcguggccuacgggaagugcgacuccgcgggccggagccgccggucccgccgggccaucgaccuccccacccacgagaaccacgggcugaagacccgccaggagaaguggaugacgggccggaugggggagcgccagcugcagaagaucgagcggugguucgugcgcaacccguucuucgccgucaccgcccucaccaucgccuaccuggugggcagcaacaugacccagcggguggucaucgcgcugcucgugcuggccgugggccccgccuacuccgcccacugcaucgggaucacggaccgcgacuucaucgagggcguccacgggggcaccugggugagcgcgacccuggagcaggacaagugcgugaccgucauggcccccgacaagcccucccucgacaucagccuggagacgguggccaucgaccggccggccgaggugcgcaaggucugcuacaacgccgugcugacccacgugaagaucaacgacaagugccccuccaccggcgaggcgcaccucgccgaggagaacgagggggacaacgccugcaagcggaccuacagcgaccggggcugggggaacggcugcgggcuguucggcaagggcuccaucgucgccugcgccaaguucacgugcgcgaaguccaugagccuguucgagguggaccagaccaagauccaguacgucauccgcgcccagcuccacgugggggccaagcaggagaacuggaacaccgacaucaagacccugaaguucgacgcccugagcggcagccaggagguggaguucaucggguacggcaaggccacgcucgagugccagguccagaccgcgguggacuucgggaacuccuacaucgccgagauggagaccgagagcuggaucguggaccggcagugggcccaggaccugacccugcccuggcaguccggcagcggcggggucuggcgcgagaugcaccaccucguggaguucgagcccccgcacgccgccacgauccgggugcuggcgcugggcaaccaggaggggucccucaagaccgcccugaccggcgccaugcgcgucaccaaggacacgaacgacaacaaccuguacaagcuccacgggggccacgugagcugccgggugaagcuguccgcccugacccucaagggcaccagcuacaagaucugcaccgacaagauguucuucgucaagaaccccacggacaccgggcacggcaccguggugaugcaggucaagguguccaagggggcgcccugccgcaucccggugaucgucgccgacgaccugaccgccgccaucaacaagggcauccuggugaccgugaacccgaucgccagcacgaacgacgacgagguccucaucgaggugaacccgcccuucggcgacuccuacaucaucguggggcggggcgacagccgccugaccuaccaguggcacaaggagggguccagcaucggcaagcuguucacccagaccaugaagggggucgagcggcuggcggugaugggcgacacggccugggacuucuccagcgccggcggguucuucaccuccgugggcaaggggauccacaccgucuucggcagcgccuuccaggggcuguucggcggccucaacuggaucaccaaggugaucaugggggccgugcugaucugggucggcaucaacacgcgcaacaugaccauguccaugagcaugauccucgugggggugaucaugauguuccugagccugggcgucggggcggaccagggcugcgccaucaacuucggcaagugaggacuaguggaagcauuuuccuggcugauuaaaagaaauuacucagcuauggucaucuguuccuguuagaaggcuaugcagcauauuauauacuaugcgcauguuaugaaaugcauaauaaaaaauuuuaaaaaaucuaaaagaucuaaaaaaaaaaaaaaaaaaaaaaaaaaaaaaaaaaaaaaaaaaaaaaaaaaaaaaaaaaaaaaaaugcaucccccccccccccccccccccccccccccccaaaggcucuuuucagagccaccagaauu

SEQ ID NO: 1825 - RNA, 2525 nt, Artificial Sequence
  mRNA product Design d-5 comprising derived and/or modified sequence from YFV__NC_002031.1__X-SS-prMEdelstem_TM-JEV (polyprotein: aa92-681) (opt2)
gggagagggcgcuuggcuugcaaggacccugagcugcggcauugaagcacacccaacccaacucgacugaagucagccucacugaaccggaucugagaaucuucucucucugggcuugccagggcucuccgaaccuagcuagcauccucuucaauuccaacuagaaagcuuaccaugcgcggccucuccucccgcaagcgccgcucccacgacguccucaccguccaguuccucauccucggcaugcuccucaugaccggcggcgucacccucguccgcaagaaccgcuggcuccuccucaacgucaccuccgaggaccucggcaagaccuucuccgucggcaccggcaacugcaccaccaacauccucgaggccaaguacuggugccccgacuccauggaguacaacugccccaaccucuccccccgcgaggagcccgacgacaucgacugcuggugcuacggcgucgagaacguccgcgucgccuacggcaagugcgacuccgccggccgcucccgccgcucccgccgcgccaucgaccuccccacccacgagaaccacggccucaagacccgccaggagaaguggaugaccggccgcaugggcgagcgccagcuccagaagaucgagcgcugguucguccgcaaccccuucuucgccgucaccgcccucaccaucgccuaccucgucggcuccaacaugacccagcgcgucgucaucgcccuccucguccucgccgucggccccgccuacuccgcccacugcaucggcaucaccgaccgcgacuucaucgagggcguccacggcggcaccugggucuccgccacccucgagcaggacaagugcgucaccgucauggcccccgacaagcccucccucgacaucucccucgagaccgucgccaucgaccgccccgccgagguccgcaaggucugcuacaacgccguccucacccacgucaagaucaacgacaagugccccuccaccggcgaggcccaccucgccgaggagaacgagggcgacaacgccugcaagcgcaccuacuccgaccgcggcuggggcaacggcugcggccucuucggcaagggcuccaucgucgccugcgccaaguucaccugcgccaaguccaugucccucuucgaggucgaccagaccaagauccaguacgucauccgcgcccagcuccacgucggcgccaagcaggagaacuggaacaccgacaucaagacccucaaguucgacgcccucuccggcucccaggaggucgaguucaucggcuacggcaaggccacccucgagugccagguccagaccgccgucgacuucggcaacuccuacaucgccgagauggagaccgaguccuggaucgucgaccgccagugggcccaggaccucacccuccccuggcaguccggcuccggcggcgucuggcgcgagaugcaccaccucgucgaguucgagcccccccacgccgccaccauccgcguccucgcccucggcaaccaggagggcucccucaagaccgcccucaccggcgccaugcgcgucaccaaggacaccaacgacaacaaccucuacaagcuccacggcggccacgucuccugccgcgucaagcucuccgcccucacccucaagggcaccuccuacaagaucugcaccgacaagauguucuucgucaagaaccccaccgacaccggccacggcaccgucgucaugcaggucaaggucuccaagggcgcccccugccgcauccccgucaucgucgccgacgaccucaccgccgccaucaacaagggcauccucgucaccgucaaccccaucgccuccaccaacgacgacgagguccucaucgaggucaacccccccuucggcgacuccuacaucaucgucggccgcggcgacucccgccucaccuaccaguggcacaaggagggcuccuccaucggcuccacccucggcaaggccuucuccaccacccucaagggcgcccagcgccucgccgcccucggcgacaccgccugggacuucggcuccaucggcggcgucuucaacuccaucggccgcgccguccaccaggucuucggcggcgccuuccgcacccucuucggcggcauguccuggaucacccagggccucaugggcgcccuccuccucuggaugggcgucaacgcccgcgaccgcuccaucgcccucgccuuccucgccaccggcggcguccucgucuuccucgccaccaacguccacgccugaggacuaguggaagcauuuuccuggcugauuaaaagaaauuacucagcuauggucaucuguuccuguuagaaggcuaugcagcauauuauauacuaugcgcauguuaugaaaugcauaauaaaaaauuuuaaaaaaucuaaaagaucuaaaaaaaaaaaaaaaaaaaaaaaaaaaaaaaaaaaaaaaaaaaaaaaaaaaaaaaaaaaaaaaaugcaucccccccccccccccccccccccccccccccaaaggcucuuuucagagccaccagaauu

SEQ ID NO: 1826 - RNA, 2498 nt, Artificial Sequence
  mRNA product Design d-5 comprising derived and/or modified sequence from YFV__NC_002031.1__SSjev(V3)-prMEdelstem_TM-JEV (polyprotein: aa122-681) (opt2)
gggagagggcgcuuggcuugcaaggacccugagcugcggcauugaagcacacccaacccaacucgacugaagucagccucacugaaccggaucugagaaucuucucucucugggcuugccagggcucuccgaaccuagcuagcauccucuucaauuccaacuagaaagcuuaccaugaacgagggcuccaucauguggcucgccucccucgccgucgucaucgccugcgccggcgccgucacccucguccgcaagaaccgcuggcuccuccucaacgucaccuccgaggaccucggcaagaccuucuccgucggcaccggcaacugcaccaccaacauccucgaggccaaguacuggugccccgacuccauggaguacaacugccccaaccucuccccccgcgaggagcccgacgacaucgacugcuggugcuacggcgucgagaacguccgcgucgccuacggcaagugcgacuccgccggccgcucccgccgcucccgccgcgccaucgaccuccccacccacgagaaccacggccucaagacccgccaggagaaguggaugaccggccgcaugggcgagcgccagcuccagaagaucgagcgcugguucguccgcaaccccuucuucgccgucaccgcccucaccaucgccuaccucgucggcuccaacaugacccagcgcgucgucaucgcccuccucguccucgccgucggccccgccuacuccgcccacugcaucggcaucaccgaccgcgacuucaucgagggcguccacggcggcaccugggucuccgccacccucgagcaggacaagugcgucaccgucauggcccccgacaagcccucccucgacaucucccucgagaccgucgccaucgaccgccccgccgagguccgcaaggucugcuacaacgccguccucacccacgucaagaucaacgacaagugccccuccaccggcgaggcccaccucgccgaggagaacgagggcgacaacgccugcaagcgcaccuacuccgaccgcggcuggggcaacggcugcggccucuucggcaagggcuccaucgucgccugcgccaaguucaccugcgccaaguccaugucccucuucgaggucgaccagaccaagauccaguacgucauccgcgcccagcuccacgucggcgccaagcaggagaacuggaacaccgacaucaagacccucaaguucgacgcccucuccggcucccaggaggucgaguucaucggcuacggcaaggccacccucgagugccagguccagaccgccgucgacuucggcaacuccuacaucgccgagauggagaccgaguccuggaucgucgaccgccagugggcccaggaccucacccuccccuggcaguccggcuccggcggcgucuggcgcgagaugcaccaccucgucgaguucgagcccccccacgccgccaccauccgcguccucgcccucggcaaccaggagggcucccucaagaccgcccucaccggcgccaugcgcgucaccaaggacaccaacgacaacaaccucuacaagcuccacggcggccacgucuccugccgcgucaagcucuccgcccucacccucaagggcaccuccuacaagaucugcaccgacaagauguucuucgucaagaaccccaccgacaccggccacggcaccgucgucaugcaggucaaggucuccaagggcgcccccugccgcauccccgucaucgucgccgacgaccucaccgccgccaucaacaagggcauccucgucaccgucaaccccaucgccuccaccaacgacgacgagguccucaucgaggucaacccccccuucggcgacuccuacaucaucgucggccgcggcgacucccgccucaccuaccaguggcacaaggagggcuccuccaucggcuccacccucggcaaggccuucuccaccacccucaagggcgcccagcgccucgccgcccucggcgacaccgccugggacuucggcuccaucggcggcgucuucaacuccaucggccgcgccguccaccaggucuucggcggcgccuuccgcacccucuucggcggcauguccuggaucacccagggccucaugggcgcccuccuccucuggaugggcgucaacgcccgcgaccgcuccaucgcccucgccuuccucgccaccggcggcguccucgucuuccucgccaccaacguccacgccugaggacuaguggaagcauuuuccuggcugauuaaaagaaauuacucagcuauggucaucuguuccuguuagaaggcuaugcagcauauuauauacuaugcgcauguuaugaaaugcauaauaaaaaauuuuaaaaaaucuaaaagaucuaaaaaaaaaaaaaaaaaaaaaaaaaaaaaaaaaaaaaaaaaaaaaaaaaaaaaaaaaaaaaaaaugcaucccccccccccccccccccccccccccccccaaaggcucuuuucagagccaccagaauu

SEQ ID NO: 1827 - RNA, 2513 nt, Artificial Sequence
  mRNA product Design d-5 comprising derived and/or modified sequence from YFV__NC_002031.1__X-SS-prME (polyprotein: aa92-778) (opt2)
gggagagggcgcuuggcuugcaaggacccugagcugcggcauugaagcacacccaacccaacucgacugaagucagccucacugaaccggaucugagaaucuucucucucugggcuugccagggcucuccgaaccuagcuagcauccucuucaauuccaacuagaaagcuuaccaugcgcggccucuccucccgcaagcgccgcucccacgacguccucaccguccaguuccucauccucggcaugcuccucaugaccggcggcgucacccucguccgcaagaaccgcuggcuccuccucaacgucaccuccgaggaccucggcaagaccuucuccgucggcaccggcaacugcaccaccaacauccucgaggccaaguacuggugccccgacuccauggaguacaacugccccaaccucuccccccgcgaggagcccgacgacaucgacugcuggugcuacggcgucgagaacguccgcgucgccuacggcaagugcgacuccgccggccgcucccgccgcucccgccgcgccaucgaccuccccacccacgagaaccacggccucaagacccgccaggagaaguggaugaccggccgcaugggcgagcgccagcuccagaagaucgagcgcugguucguccgcaaccccuucuucgccgucaccgcccucaccaucgccuaccucgucggcuccaacaugacccagcgcgucgucaucgcccuccucguccucgccgucggccccgccuacuccgcccacugcaucggcaucaccgaccgcgacuucaucgagggcguccacggcggcaccugggucuccgccacccucgagcaggacaagugcgucaccgucauggcccccgacaagcccucccucgacaucucccucgagaccgucgccaucgaccgccccgccgagguccgcaaggucugcuacaacgccguccucacccacgucaagaucaacgacaagugccccuccaccggcgaggcccaccucgccgaggagaacgagggcgacaacgccugcaagcgcaccuacuccgaccgcggcuggggcaacggcugcggccucuucggcaagggcuccaucgucgccugcgccaaguucaccugcgccaaguccaugucccucuucgaggucgaccagaccaagauccaguacgucauccgcgcccagcuccacgucggcgccaagcaggagaacuggaacaccgacaucaagacccucaaguucgacgcccucuccggcucccaggaggucgaguucaucggcuacggcaaggccacccucgagugccagguccagaccgccgucgacuucggcaacuccuacaucgccgagauggagaccgaguccuggaucgucgaccgccagugggcccaggaccucacccuccccuggcaguccggcuccggcggcgucuggcgcgagaugcaccaccucgucgaguucgagcccccccacgccgccaccauccgcguccucgcccucggcaaccaggagggcucccucaagaccgcccucaccggcgccaugcgcgucaccaaggacaccaacgacaacaaccucuacaagcuccacggcggccacgucuccugccgcgucaagcucuccgcccucacccucaagggcaccuccuacaagaucugcaccgacaagauguucuucgucaagaaccccaccgacaccggccacggcaccgucgucaugcaggucaaggucuccaagggcgcccccugccgcauccccgucaucgucgccgacgaccucaccgccgccaucaacaagggcauccucgucaccgucaaccccaucgccuccaccaacgacgacgagguccucaucgaggucaacccccccuucggcgacuccuacaucaucgucggccgcggcgacucccgccucaccuaccaguggcacaaggagggcuccuccaucggcaagcucuucacccagaccaugaagggcgucgagcgccucgccgucaugggcgacaccgccugggacuucuccuccgccggcggcuucuucaccuccgucggcaagggcauccacaccgucuucggcuccgccuuccagggccucuucggcggccucaacuggaucaccaaggucaucaugggcgccguccucaucugggucggcaucaacacccgcaacaugaccauguccauguccaugauccucgucggcgucaucaugauguuccucucccucggcgucggcgccugaggacuaguggaagcauuuuccuggcugauuaaaagaaauuacucagcuauggucaucuguuccuguuagaaggcuaugcagcauauuauauacuaugcgcauguuaugaaaugcauaauaaaaaauuuuaaaaaaucuaaaagaucuaaaaaaaaaaaaaaaaaaaaaaaaaaaaaaaaaaaaaaaaaaaaaaaaaaaaaaaaaaaaaaaaugcaucccccccccccccccccccccccccccccccaaaggcucuuuucagagccaccagaauu

SEQ ID NO: 1828 - RNA, 2516 nt, Artificial Sequence
  mRNA product Design d-5 comprising derived and/or modified sequence from YFV__NC_002031.1__SSjev(V3)-prME-XX (polyprotein: aa122-788) (opt2)
gggagagggcgcuuggcuugcaaggacccugagcugcggcauugaagcacacccaacccaacucgacugaagucagccucacugaaccggaucugagaaucuucucucucugggcuugccagggcucuccgaaccuagcuagcauccucuucaauuccaacuagaaagcuuaccaugaacgagggcuccaucauguggcucgccucccucgccgucgucaucgccugcgccggcgccgucacccucguccgcaagaaccgcuggcuccuccucaacgucaccuccgaggaccucggcaagaccuucuccgucggcaccggcaacugcaccaccaacauccucgaggccaaguacuggugccccgacuccauggaguacaacugccccaaccucuccccccgcgaggagcccgacgacaucgacugcuggugcuacggcgucgagaacguccgcgucgccuacggcaagugcgacuccgccggccgcucccgccgcucccgccgcgccaucgaccuccccacccacgagaaccacggccucaagacccgccaggagaaguggaugaccggccgcaugggcgagcgccagcuccagaagaucgagcgcugguucguccgcaaccccuucuucgccgucaccgcccucaccaucgccuaccucgucggcuccaacaugacccagcgcgucgucaucgcccuccucguccucgccgucggccccgccuacuccgcccacugcaucggcaucaccgaccgcgacuucaucgagggcguccacggcggcaccugggucuccgccacccucgagcaggacaagugcgucaccgucauggcccccgacaagcccucccucgacaucucccucgagaccgucgccaucgaccgccccgccgagguccgcaaggucugcuacaacgccguccucacccacgucaagaucaacgacaagugccccuccaccggcgaggcccaccucgccgaggagaacgagggcgacaacgccugcaagcgcaccuacuccgaccgcggcuggggcaacggcugcggccucuucggcaagggcuccaucgucgccugcgccaaguucaccugcgccaaguccaugucccucuucgaggucgaccagaccaagauccaguacgucauccgcgcccagcuccacgucggcgccaagcaggagaacuggaacaccgacaucaagacccucaaguucgacgcccucuccggcucccaggaggucgaguucaucggcuacggcaaggccacccucgagugccagguccagaccgccgucgacuucggcaacuccuacaucgccgagauggagaccgaguccuggaucgucgaccgccagugggcccaggaccucacccuccccuggcaguccggcuccggcggcgucuggcgcgagaugcaccaccucgucgaguucgagcccccccacgccgccaccauccgcguccucgcccucggcaaccaggagggcucccucaagaccgcccucaccggcgccaugcgcgucaccaaggacaccaacgacaacaaccucuacaagcuccacggcggccacgucuccugccgcgucaagcucuccgcccucacccucaagggcaccuccuacaagaucugcaccgacaagauguucuucgucaagaaccccaccgacaccggccacggcaccgucgucaugcaggucaaggucuccaagggcgcccccugccgcauccccgucaucgucgccgacgaccucaccgccgccaucaacaagggcauccucgucaccgucaaccccaucgccuccaccaacgacgacgagguccucaucgaggucaacccccccuucggcgacuccuacaucaucgucggccgcggcgacucccgccucaccuaccaguggcacaaggagggcuccuccaucggcaagcucuucacccagaccaugaagggcgucgagcgccucgccgucaugggcgacaccgccugggacuucuccuccgccggcggcuucuucaccuccgucggcaagggcauccacaccgucuucggcuccgccuuccagggccucuucggcggccucaacuggaucaccaaggucaucaugggcgccguccucaucugggucggcaucaacacccgcaacaugaccauguccauguccaugauccucgucggcgucaucaugauguuccucucccucggcgucggcgccgaccagggcugcgccaucaacuucggcaagugaggacuaguggaagcauuuuccuggcugauuaaaagaaauuacucagcuauggucaucuguuccuguuagaaggcuaugcagcauauuauauacuaugcgcauguuaugaaaugcauaauaaaaaauuuuaaaaaaucuaaaagaucuaaaaaaaaaaaaaaaaaaaaaaaaaaaaaaaaaaaaaaaaaaaaaaaaaaaaaaaaaaaaaaaaugcaucccccccccccccccccccccccccccccccaaaggcucuuuucagagccaccagaauu

SEQ ID NO: 1829 - RNA, 2525 nt, Artificial Sequence
  mRNA product Design d-5 comprising derived and/or modified sequence from YFV__NC_002031.1__X-SS-prMEdelstem_TM-JEV (polyprotein: aa92-681) (opt3)
gggagagggcgcuuggcuugcaaggacccugagcugcggcauugaagcacacccaacccaacucgacugaagucagccucacugaaccggaucugagaaucuucucucucugggcuugccagggcucuccgaaccuagcuagcauccucuucaauuccaacuagaaagcuuaccaugagaggccugagcuccaggaagcggcgcucucacgacgugcucaccguccaguuccuuauccuggggauguuguuaaugacaggagguguuacucuggugcguaaaaaccgauggcuacuccugaauguaacgucagaggaucuuggcaagaccuuuaguguggggacaggaaacugcacuaccaauauucuggaagccaaauacuggugucccgacagcauggaguauaacugcccuaauuuguccccaagagaggaaccggaugacauagauuguuggugcuacggcgucgaaaacgugaggguugcuuaugguaagugugacucugcagggcggucgcgcagaucaaggcgggccaucgaucuccccacacaugagaaucacggacugaaaacccgccaagagaaguggaugacuggccgaaugggcgaaagacagcugcagaagauugagaggugguucgugcggaacccuuucuucgcggucacagcucucaccaucgccuacuuaguggggagcaauaugacgcagcguguaguuauugcacugcuuguguuggccgucggaccagcuuauagugcacauugcaucgguauaacugaccgcgauuuuaucgaaggcgugcacgggggaaccuggguguccgccacacuggagcaagacaaaugugucacuguuauggcucccgauaagccuucucuagacauuagccucgagaccguggccaucgauagaccagcggaaguaaggaaagugugcuacaacgcaguccugacacaugugaagauuaaugacaaaugucccuccaccggcgaggcccaccuugcugaagagaacgaaggugacaaugccugcaagcggacguauucagaucgaggguggggaaacggcuguggccuguucgggaagggaaguaucguugcaugcgcuaaauuuacuugcgccaagagcaugucuuuguucgagguggaccagacaaaaauacaguacgucauucgcgcgcagcuccacgugggugccaagcaagagaauuggaacaccgauaucaaaacucugaaguuugacgcauuauccggcucacaggaaguagaguucauuggguacggaaaagcuacacuggaaugucagguucagaccgccguggauuuuggcaacagcuauaucgcugagauggaaacggagaguuggaucgucgacagacaaugggcccaggaucucacccuuccuuggcagucugguuccgggggcguguggagggagaugcaucaccuggucgaauuugagccaccgcaugcagccacaauucggguguuggcucuaggaaaucaagaaggcagccugaagacugcgcucaccggggcaaugcgcguuacaaaggacacuaacgauaauaaccuguacaaacuucacggaggucacgugucgugcagaguaaagcugucugccuugacccucaaaggcacauccuauaagauauguaccgacaaaauguuuuucgucaagaaucccacugauacggggcauggaacagugguuaugcaagugaaggucucaaaaggcgcuccuugcaggaucccagugauuguagccgacgaccugaccgcagccaucaacaaggguauauuagugacuguuaaucccauugcuaguaccaacgaugacgagguccugaucgaagugaauccuccauucggggauagcuacaucauugugggccguggagacucccggcuaacauaucaguggcacaaagagggcucuagcaucggcagcacccuggggaaggccuucuccacaacucucaaaggagcucagagacuugcagcccugggugacacggcgugggauuuuggcucuaucgggggaguguucaacucaauuggcagggcuguccaccaaguuuuugguggggccuuccggaccuuguuuggaggcaugaguuggauaacacagggcuuaaugggggcacugcuacucuggaugggagugaaugcccgcgaccgaagcaucgcucuggcauuccuugccacugguggcguacugguguuuuuggcuaccaacguccaugccugaggacuaguggaagcauuuuccuggcugauuaaaagaaauuacucagcuauggucaucuguuccuguuagaaggcuaugcagcauauuauauacuaugcgcauguuaugaaaugcauaauaaaaaauuuuaaaaaaucuaaaagaucuaaaaaaaaaaaaaaaaaaaaaaaaaaaaaaaaaaaaaaaaaaaaaaaaaaaaaaaaaaaaaaaaugcaucccccccccccccccccccccccccccccccaaaggcucuuuucagagccaccagaauu

SEQ ID NO: 1830 - RNA, 2498 nt, Artificial Sequence
  mRNA product Design d-5 comprising derived and/or modified sequence from YFV__NC_002031.1__SSjev(V3)-prMEdelstem_TM-JEV (polyprotein: aa122-681) (opt3)
gggagagggcgcuuggcuugcaaggacccugagcugcggcauugaagcacacccaacccaacucgacugaagucagccucacugaaccggaucugagaaucuucucucucugggcuugccagggcucuccgaaccuagcuagcauccucuucaauuccaacuagaaagcuuaccaugaacgagggcagcaucauguggcuggccucccucgcuguggucauugcaugcgccggggcgguuacucuggugcguaaaaaccgauggcuacuccugaauguaacgucagaggaucuuggcaagaccuuuaguguggggacaggaaacugcacuaccaauauucuggaagccaaauacuggugucccgacagcauggaguauaacugcccuaauuuguccccaagagaggaaccggaugacauagauuguuggugcuacggcgucgaaaacgugaggguugcuuaugguaagugugacucugcagggcggucgcgcagaucaaggcgggccaucgaucuccccacacaugagaaucacggacugaaaacccgccaagagaaguggaugacuggccgaaugggcgaaagacagcugcagaagauugagaggugguucgugcggaacccuuucuucgcggucacagcucucaccaucgccuacuuaguggggagcaauaugacgcagcguguaguuauugcacugcuuguguuggccgucggaccagcuuauagugcacauugcaucgguauaacugaccgcgauuuuaucgaaggcgugcacgggggaaccuggguguccgccacacuggagcaagacaaaugugucacuguuauggcucccgauaagccuucucuagacauuagccucgagaccguggccaucgauagaccagcggaaguaaggaaagugugcuacaacgcaguccugacacaugugaagauuaaugacaaaugucccuccaccggcgaggcccaccuugcugaagagaacgaaggugacaaugccugcaagcggacguauucagaucgaggguggggaaacggcuguggccuguucgggaagggaaguaucguugcaugcgcuaaauuuacuugcgccaagagcaugucuuuguucgagguggaccagacaaaaauacaguacgucauucgcgcgcagcuccacgugggugccaagcaagagaauuggaacaccgauaucaaaacucugaaguuugacgcauuauccggcucacaggaaguagaguucauuggguacggaaaagcuacacuggaaugucagguucagaccgccguggauuuuggcaacagcuauaucgcugagauggaaacggagaguuggaucgucgacagacaaugggcccaggaucucacccuuccuuggcagucugguuccgggggcguguggagggagaugcaucaccuggucgaauuugagccaccgcaugcagccacaauucggguguuggcucuaggaaaucaagaaggcagccugaagacugcgcucaccggggcaaugcgcguuacaaaggacacuaacgauaauaaccuguacaaacuucacggaggucacgugucgugcagaguaaagcugucugccuugacccucaaaggcacauccuauaagauauguaccgacaaaauguuuuucgucaagaaucccacugauacggggcauggaacagugguuaugcaagugaaggucucaaaaggcgcuccuugcaggaucccagugauuguagccgacgaccugaccgcagccaucaacaaggguauauuagugacuguuaaucccauugcuaguaccaacgaugacgagguccugaucgaagugaauccuccauucggggauagcuacaucauugugggccguggagacucccggcuaacauaucaguggcacaaagagggcucuagcaucggcagcacccuggggaaggccuucuccacaacucucaaaggagcucagagacuugcagcccugggugacacggcgugggauuuuggcucuaucgggggaguguucaacucaauuggcagggcuguccaccaaguuuuugguggggccuuccggaccuuguuuggaggcaugaguuggauaacacagggcuuaaugggggcacugcuacucuggaugggagugaaugcccgcgaccgaagcaucgcucuggcauuccuugccacugguggcguacugguguuuuuggcuaccaacguccaugccugaggacuaguggaagcauuuuccuggcugauuaaaagaaauuacucagcuauggucaucuguuccuguuagaaggcuaugcagcauauuauauacuaugcgcauguuaugaaaugcauaauaaaaaauuuuaaaaaaucuaaaagaucuaaaaaaaaaaaaaaaaaaaaaaaaaaaaaaaaaaaaaaaaaaaaaaaaaaaaaaaaaaaaaaaaugcaucccccccccccccccccccccccccccccccaaaggcucuuuucagagccaccagaauu

SEQ ID NO: 1831 - RNA, 2513 nt, Artificial Sequence
  mRNA product Design d-5 comprising derived and/or modified sequence from YFV__NC_002031.1__X-SS-prME (polyprotein: aa92-778) (opt3)
gggagagggcgcuuggcuugcaaggacccugagcugcggcauugaagcacacccaacccaacucgacugaagucagccucacugaaccggaucugagaaucuucucucucugggcuugccagggcucuccgaaccuagcuagcauccucuucaauuccaacuagaaagcuuaccaugagaggccugagcuccaggaagcggcgcucucacgacgugcucaccguccaguuccuuauccuggggauguuguuaaugacaggagguguuacucuggugcguaaaaaccgauggcuacuccugaauguaacgucagaggaucuuggcaagaccuuuaguguggggacaggaaacugcacuaccaauauucuggaagccaaauacuggugucccgacagcauggaguauaacugcccuaauuuguccccaagagaggaaccggaugacauagauuguuggugcuacggcgucgaaaacgugaggguugcuuaugguaagugugacucugcagggcggucgcgcagaucaaggcgggccaucgaucuccccacacaugagaaucacggacugaaaacccgccaagagaaguggaugacuggccgaaugggcgaaagacagcugcagaagauugagaggugguucgugcggaacccuuucuucgcggucacagcucucaccaucgccuacuuaguggggagcaauaugacgcagcguguaguuauugcacugcuuguguuggccgucggaccagcuuauagugcacauugcaucgguauaacugaccgcgauuuuaucgaaggcgugcacgggggaaccuggguguccgccacacuggagcaagacaaaugugucacuguuauggcucccgauaagccuucucuagacauuagccucgagaccguggccaucgauagaccagcggaaguaaggaaagugugcuacaacgcaguccugacacaugugaagauuaaugacaaaugucccuccaccggcgaggcccaccuugcugaagagaacgaaggugacaaugccugcaagcggacguauucagaucgaggguggggaaacggcuguggccuguucgggaagggaaguaucguugcaugcgcuaaauuuacuugcgccaagagcaugucuuuguucgagguggaccagacaaaaauacaguacgucauucgcgcgcagcuccacgugggugccaagcaagagaauuggaacaccgauaucaaaacucugaaguuugacgcauuauccggcucacaggaaguagaguucauuggguacggaaaagcuacacuggaaugucagguucagaccgccguggauuuuggcaacagcuauaucgcugagauggaaacggagaguuggaucgucgacagacaaugggcccaggaucucacccuuccuuggcagucugguuccgggggcguguggagggagaugcaucaccuggucgaauuugagccaccgcaugcagccacaauucggguguuggcucuaggaaaucaagaaggcagccugaagacugcgcucaccggggcaaugcgcguuacaaaggacacuaacgauaauaaccuguacaaacuucacggaggucacgugucgugcagaguaaagcugucugccuugacccucaaaggcacauccuauaagauauguaccgacaaaauguuuuucgucaagaaucccacugauacggggcauggaacagugguuaugcaagugaaggucucaaaaggcgcuccuugcaggaucccagugauuguagccgacgaccugaccgcagccaucaacaaggguauauuagugacuguuaaucccauugcuaguaccaacgaugacgagguccugaucgaagugaauccuccauucggggauagcuacaucauugugggccguggagacucccggcuaacauaucaguggcacaaagagggcucuagcaucgggaagcucuuuacccagacuaugaaaggagucgagcgacuggccguuaugggugauacagcaugggacuucucaagugcgggcggguuuuucacguccgugggaaagggcauucauaccguguuugguagcgcuuuccaggggcuuuuuggcggauugaacuggauaacuaagguaaucaugggcgccguccugauuuggguggggaucaauacaagaaacaugaccaugucuaugucaaugauccucguuggagugauuaugauguuccugagucuuggcgucggugcaugaggacuaguggaagcauuuuccuggcugauuaaaagaaauuacucagcuauggucaucuguuccuguuagaaggcuaugcagcauauuauauacuaugcgcauguuaugaaaugcauaauaaaaaauuuuaaaaaaucuaaaagaucuaaaaaaaaaaaaaaaaaaaaaaaaaaaaaaaaaaaaaaaaaaaaaaaaaaaaaaaaaaaaaaaaugcaucccccccccccccccccccccccccccccccaaaggcucuuuucagagccaccagaauu

SEQ ID NO: 1832 - RNA, 2516 nt, Artificial Sequence
  mRNA product Design d-5 comprising derived and/or modified sequence from YFV__NC_002031.1__SSjev(V3)-prME-XX (polyprotein: aa122-788) (opt3)
gggagagggcgcuuggcuugcaaggacccugagcugcggcauugaagcacacccaacccaacucgacugaagucagccucacugaaccggaucugagaaucuucucucucugggcuugccagggcucuccgaaccuagcuagcauccucuucaauuccaacuagaaagcuuaccaugaacgagggcagcaucauguggcuggccucccucgcuguggucauugcaugcgccggggcgguuacucuggugcguaaaaaccgauggcuacuccugaauguaacgucagaggaucuuggcaagaccuuuaguguggggacaggaaacugcacuaccaauauucuggaagccaaauacuggugucccgacagcauggaguauaacugcccuaauuuguccccaagagaggaaccggaugacauagauuguuggugcuacggcgucgaaaacgugaggguugcuuaugguaagugugacucugcagggcggucgcgcagaucaaggcgggccaucgaucuccccacacaugagaaucacggacugaaaacccgccaagagaaguggaugacuggccgaaugggcgaaagacagcugcagaagauugagaggugguucgugcggaacccuuucuucgcggucacagcucucaccaucgccuacuuaguggggagcaauaugacgcagcguguaguuauugcacugcuuguguuggccgucggaccagcuuauagugcacauugcaucgguauaacugaccgcgauuuuaucgaaggcgugcacgggggaaccuggguguccgccacacuggagcaagacaaaugugucacuguuauggcucccgauaagccuucucuagacauuagccucgagaccguggccaucgauagaccagcggaaguaaggaaagugugcuacaacgcaguccugacacaugugaagauuaaugacaaaugucccuccaccggcgaggcccaccuugcugaagagaacgaaggugacaaugccugcaagcggacguauucagaucgaggguggggaaacggcuguggccuguucgggaagggaaguaucguugcaugcgcuaaauuuacuugcgccaagagcaugucuuuguucgagguggaccagacaaaaauacaguacgucauucgcgcgcagcuccacgugggugccaagcaagagaauuggaacaccgauaucaaaacucugaaguuugacgcauuauccggcucacaggaaguagaguucauuggguacggaaaagcuacacuggaaugucagguucagaccgccguggauuuuggcaacagcuauaucgcugagauggaaacggagaguuggaucgucgacagacaaugggcccaggaucucacccuuccuuggcagucugguuccgggggcguguggagggagaugcaucaccuggucgaauuugagccaccgcaugcagccacaauucggguguuggcucuaggaaaucaagaaggcagccugaagacugcgcucaccggggcaaugcgcguuacaaaggacacuaacgauaauaaccuguacaaacuucacggaggucacgugucgugcagaguaaagcugucugccuugacccucaaaggcacauccuauaagauauguaccgacaaaauguuuuucgucaagaaucccacugauacggggcauggaacagugguuaugcaagugaaggucucaaaaggcgcuccuugcaggaucccagugauuguagccgacgaccugaccgcagccaucaacaaggguauauuagugacuguuaaucccauugcuaguaccaacgaugacgagguccugaucgaagugaauccuccauucggggauagcuacaucauugugggccguggagacucccggcuaacauaucaguggcacaaagagggcucuagcaucgggaagcucuuuacccagacuaugaaaggagucgagcgacuggccguuaugggugauacagcaugggacuucucaagugcgggcggguuuuucacguccgugggaaagggcauucauaccguguuugguagcgcuuuccaggggcuuuuuggcggauugaacuggauaacuaagguaaucaugggcgccguccugauuuggguggggaucaauacaagaaacaugaccaugucuaugucaaugauccucguuggagugauuaugauguuccugagucuuggcgucggugcagaucaggggugugccauaaauuuuggaaaaugaggacuaguggaagcauuuuccuggcugauuaaaagaaauuacucagcuauggucaucuguuccuguuagaaggcuaugcagcauauuauauacuaugcgcauguuaugaaaugcauaauaaaaaauuuuaaaaaaucuaaaagaucuaaaaaaaaaaaaaaaaaaaaaaaaaaaaaaaaaaaaaaaaaaaaaaaaaaaaaaaaaaaaaaaaugcaucccccccccccccccccccccccccccccccaaaggcucuuuucagagccaccagaauu

SEQ ID NO: 1833 - RNA, 2525 nt, Artificial Sequence
  mRNA product Design d-5 comprising derived and/or modified sequence from YFV__NC_002031.1__X-SS-prMEdelstem_TM-JEV (polyprotein: aa92-681) (opt4)
gggagagggcgcuuggcuugcaaggacccugagcugcggcauugaagcacacccaacccaacucgacugaagucagccucacugaaccggaucugagaaucuucucucucugggcuugccagggcucuccgaaccuagcuagcauccucuucaauuccaacuagaaagcuuaccaugagaggccugagcagcagaaagagaagaagccacgacgugcugaccgugcaguuccugauccugggcaugcugcugaugaccggcggcgugacccuggugagaaagaacagauggcugcugcugaacgugaccagcgaggaccugggcaagaccuucagcgugggcaccggcaacugcaccaccaacauccuggaggccaaguacuggugccccgacagcauggaguacaacugccccaaccugagccccagagaggagcccgacgacaucgacugcuggugcuacggcguggagaacgugagaguggccuacggcaagugcgacagcgccggcagaagcagaagaagcagaagagccaucgaccugcccacccacgagaaccacggccugaagaccagacaggagaaguggaugaccggcagaaugggcgagagacagcugcagaagaucgagagaugguucgugagaaaccccuucuucgccgugaccgcccugaccaucgccuaccuggugggcagcaacaugacccagagaguggugaucgcccugcuggugcuggccgugggccccgccuacagcgcccacugcaucggcaucaccgacagagacuucaucgagggcgugcacggcggcaccugggugagcgccacccuggagcaggacaagugcgugaccgugauggcccccgacaagcccagccuggacaucagccuggagaccguggccaucgacagacccgccgaggugagaaaggugugcuacaacgccgugcugacccacgugaagaucaacgacaagugccccagcaccggcgaggcccaccuggccgaggagaacgagggcgacaacgccugcaagagaaccuacagcgacagaggcuggggcaacggcugcggccuguucggcaagggcagcaucguggccugcgccaaguucaccugcgccaagagcaugagccuguucgagguggaccagaccaagauccaguacgugaucagagcccagcugcacgugggcgccaagcaggagaacuggaacaccgacaucaagacccugaaguucgacgcccugagcggcagccaggagguggaguucaucggcuacggcaaggccacccuggagugccaggugcagaccgccguggacuucggcaacagcuacaucgccgagauggagaccgagagcuggaucguggacagacagugggcccaggaccugacccugcccuggcagagcggcagcggcggcguguggagagagaugcaccaccugguggaguucgagcccccccacgccgccaccaucagagugcuggcccugggcaaccaggagggcagccugaagaccgcccugaccggcgccaugagagugaccaaggacaccaacgacaacaaccuguacaagcugcacggcggccacgugagcugcagagugaagcugagcgcccugacccugaagggcaccagcuacaagaucugcaccgacaagauguucuucgugaagaaccccaccgacaccggccacggcaccguggugaugcaggugaaggugagcaagggcgcccccugcagaauccccgugaucguggccgacgaccugaccgccgccaucaacaagggcauccuggugaccgugaaccccaucgccagcaccaacgacgacgaggugcugaucgaggugaacccccccuucggcgacagcuacaucaucgugggcagaggcgacagcagacugaccuaccaguggcacaaggagggcagcagcaucggcagcacccugggcaaggccuucagcaccacccugaagggcgcccagagacuggccgcccugggcgacaccgccugggacuucggcagcaucggcggcguguucaacagcaucggcagagccgugcaccagguguucggcggcgccuucagaacccuguucggcggcaugagcuggaucacccagggccugaugggcgcccugcugcuguggaugggcgugaacgccagagacagaagcaucgcccuggccuuccuggccaccggcggcgugcugguguuccuggccaccaacgugcacgccugaggacuaguggaagcauuuuccuggcugauuaaaagaaauuacucagcuauggucaucuguuccuguuagaaggcuaugcagcauauuauauacuaugcgcauguuaugaaaugcauaauaaaaaauuuuaaaaaaucuaaaagaucuaaaaaaaaaaaaaaaaaaaaaaaaaaaaaaaaaaaaaaaaaaaaaaaaaaaaaaaaaaaaaaaaugcaucccccccccccccccccccccccccccccccaaaggcucuuuucagagccaccagaauu

SEQ ID NO: 1834 - RNA, 2498 nt, Artificial Sequence
  mRNA product Design d-5 comprising derived and/or modified sequence from YFV__NC_002031.1__SSjev(V3)-prMEdelstem_TM-JEV (polyprotein: aa122-681) (opt4)
gggagagggcgcuuggcuugcaaggacccugagcugcggcauugaagcacacccaacccaacucgacugaagucagccucacugaaccggaucugagaaucuucucucucugggcuugccagggcucuccgaaccuagcuagcauccucuucaauuccaacuagaaagcuuaccaugaacgagggcagcaucauguggcuggccagccuggccguggugaucgccugcgccggcgccgugacccuggugagaaagaacagauggcugcugcugaacgugaccagcgaggaccugggcaagaccuucagcgugggcaccggcaacugcaccaccaacauccuggaggccaaguacuggugccccgacagcauggaguacaacugccccaaccugagccccagagaggagcccgacgacaucgacugcuggugcuacggcguggagaacgugagaguggccuacggcaagugcgacagcgccggcagaagcagaagaagcagaagagccaucgaccugcccacccacgagaaccacggccugaagaccagacaggagaaguggaugaccggcagaaugggcgagagacagcugcagaagaucgagagaugguucgugagaaaccccuucuucgccgugaccgcccugaccaucgccuaccuggugggcagcaacaugacccagagaguggugaucgcccugcuggugcuggccgugggccccgccuacagcgcccacugcaucggcaucaccgacagagacuucaucgagggcgugcacggcggcaccugggugagcgccacccuggagcaggacaagugcgugaccgugauggcccccgacaagcccagccuggacaucagccuggagaccguggccaucgacagacccgccgaggugagaaaggugugcuacaacgccgugcugacccacgugaagaucaacgacaagugccccagcaccggcgaggcccaccuggccgaggagaacgagggcgacaacgccugcaagagaaccuacagcgacagaggcuggggcaacggcugcggccuguucggcaagggcagcaucguggccugcgccaaguucaccugcgccaagagcaugagccuguucgagguggaccagaccaagauccaguacgugaucagagcccagcugcacgugggcgccaagcaggagaacuggaacaccgacaucaagacccugaaguucgacgcccugagcggcagccaggagguggaguucaucggcuacggcaaggccacccuggagugccaggugcagaccgccguggacuucggcaacagcuacaucgccgagauggagaccgagagcuggaucguggacagacagugggcccaggaccugacccugcccuggcagagcggcagcggcggcguguggagagagaugcaccaccugguggaguucgagcccccccacgccgccaccaucagagugcuggcccugggcaaccaggagggcagccugaagaccgcccugaccggcgccaugagagugaccaaggacaccaacgacaacaaccuguacaagcugcacggcggccacgugagcugcagagugaagcugagcgcccugacccugaagggcaccagcuacaagaucugcaccgacaagauguucuucgugaagaaccccaccgacaccggccacggcaccguggugaugcaggugaaggugagcaagggcgcccccugcagaauccccgugaucguggccgacgaccugaccgccgccaucaacaagggcauccuggugaccgugaaccccaucgccagcaccaacgacgacgaggugcugaucgaggugaacccccccuucggcgacagcuacaucaucgugggcagaggcgacagcagacugaccuaccaguggcacaaggagggcagcagcaucggcagcacccugggcaaggccuucagcaccacccugaagggcgcccagagacuggccgcccugggcgacaccgccugggacuucggcagcaucggcggcguguucaacagcaucggcagagccgugcaccagguguucggcggcgccuucagaacccuguucggcggcaugagcuggaucacccagggccugaugggcgcccugcugcuguggaugggcgugaacgccagagacagaagcaucgcccuggccuuccuggccaccggcggcgugcugguguuccuggccaccaacgugcacgccugaggacuaguggaagcauuuuccuggcugauuaaaagaaauuacucagcuauggucaucuguuccuguuagaaggcuaugcagcauauuauauacuaugcgcauguuaugaaaugcauaauaaaaaauuuuaaaaaaucuaaaagaucuaaaaaaaaaaaaaaaaaaaaaaaaaaaaaaaaaaaaaaaaaaaaaaaaaaaaaaaaaaaaaaaaugcaucccccccccccccccccccccccccccccccaaaggcucuuuucagagccaccagaauu

SEQ ID NO: 1835 - RNA, 2513 nt, Artificial Sequence
  mRNA product Design d-5 comprising derived and/or modified sequence from YFV__NC_002031.1__X-SS-prME (polyprotein: aa92-778) (opt4)
gggagagggcgcuuggcuugcaaggacccugagcugcggcauugaagcacacccaacccaacucgacugaagucagccucacugaaccggaucugagaaucuucucucucugggcuugccagggcucuccgaaccuagcuagcauccucuucaauuccaacuagaaagcuuaccaugagaggccugagcagcagaaagagaagaagccacgacgugcugaccgugcaguuccugauccugggcaugcugcugaugaccggcggcgugacccuggugagaaagaacagauggcugcugcugaacgugaccagcgaggaccugggcaagaccuucagcgugggcaccggcaacugcaccaccaacauccuggaggccaaguacuggugccccgacagcauggaguacaacugccccaaccugagccccagagaggagcccgacgacaucgacugcuggugcuacggcguggagaacgugagaguggccuacggcaagugcgacagcgccggcagaagcagaagaagcagaagagccaucgaccugcccacccacgagaaccacggccugaagaccagacaggagaaguggaugaccggcagaaugggcgagagacagcugcagaagaucgagagaugguucgugagaaaccccuucuucgccgugaccgcccugaccaucgccuaccuggugggcagcaacaugacccagagaguggugaucgcccugcuggugcuggccgugggccccgccuacagcgcccacugcaucggcaucaccgacagagacuucaucgagggcgugcacggcggcaccugggugagcgccacccuggagcaggacaagugcgugaccgugauggcccccgacaagcccagccuggacaucagccuggagaccguggccaucgacagacccgccgaggugagaaaggugugcuacaacgccgugcugacccacgugaagaucaacgacaagugccccagcaccggcgaggcccaccuggccgaggagaacgagggcgacaacgccugcaagagaaccuacagcgacagaggcuggggcaacggcugcggccuguucggcaagggcagcaucguggccugcgccaaguucaccugcgccaagagcaugagccuguucgagguggaccagaccaagauccaguacgugaucagagcccagcugcacgugggcgccaagcaggagaacuggaacaccgacaucaagacccugaaguucgacgcccugagcggcagccaggagguggaguucaucggcuacggcaaggccacccuggagugccaggugcagaccgccguggacuucggcaacagcuacaucgccgagauggagaccgagagcuggaucguggacagacagugggcccaggaccugacccugcccuggcagagcggcagcggcggcguguggagagagaugcaccaccugguggaguucgagcccccccacgccgccaccaucagagugcuggcccugggcaaccaggagggcagccugaagaccgcccugaccggcgccaugagagugaccaaggacaccaacgacaacaaccuguacaagcugcacggcggccacgugagcugcagagugaagcugagcgcccugacccugaagggcaccagcuacaagaucugcaccgacaagauguucuucgugaagaaccccaccgacaccggccacggcaccguggugaugcaggugaaggugagcaagggcgcccccugcagaauccccgugaucguggccgacgaccugaccgccgccaucaacaagggcauccuggugaccgugaaccccaucgccagcaccaacgacgacgaggugcugaucgaggugaacccccccuucggcgacagcuacaucaucgugggcagaggcgacagcagacugaccuaccaguggcacaaggagggcagcagcaucggcaagcuguucacccagaccaugaagggcguggagagacuggccgugaugggcgacaccgccugggacuucagcagcgccggcggcuucuucaccagcgugggcaagggcauccacaccguguucggcagcgccuuccagggccuguucggcggccugaacuggaucaccaaggugaucaugggcgccgugcugaucugggugggcaucaacaccagaaacaugaccaugagcaugagcaugauccuggugggcgugaucaugauguuccugagccugggcgugggcgccugaggacuaguggaagcauuuuccuggcugauuaaaagaaauuacucagcuauggucaucuguuccuguuagaaggcuaugcagcauauuauauacuaugcgcauguuaugaaaugcauaauaaaaaauuuuaaaaaaucuaaaagaucuaaaaaaaaaaaaaaaaaaaaaaaaaaaaaaaaaaaaaaaaaaaaaaaaaaaaaaaaaaaaaaaaugcaucccccccccccccccccccccccccccccccaaaggcucuuuucagagccaccagaauu

SEQ ID NO: 1836 - RNA, 2516 nt, Artificial Sequence
  mRNA product Design d-5 comprising derived and/or modified sequence from YFV__NC_002031.1__SSjev(V3)-prME-XX (polyprotein: aa122-788) (opt4)
gggagagggcgcuuggcuugcaaggacccugagcugcggcauugaagcacacccaacccaacucgacugaagucagccucacugaaccggaucugagaaucuucucucucugggcuugccagggcucuccgaaccuagcuagcauccucuucaauuccaacuagaaagcuuaccaugaacgagggcagcaucauguggcuggccagccuggccguggugaucgccugcgccggcgccgugacccuggugagaaagaacagauggcugcugcugaacgugaccagcgaggaccugggcaagaccuucagcgugggcaccggcaacugcaccaccaacauccuggaggccaaguacuggugccccgacagcauggaguacaacugccccaaccugagccccagagaggagcccgacgacaucgacugcuggugcuacggcguggagaacgugagaguggccuacggcaagugcgacagcgccggcagaagcagaagaagcagaagagccaucgaccugcccacccacgagaaccacggccugaagaccagacaggagaaguggaugaccggcagaaugggcgagagacagcugcagaagaucgagagaugguucgugagaaaccccuucuucgccgugaccgcccugaccaucgccuaccuggugggcagcaacaugacccagagaguggugaucgcccugcuggugcuggccgugggccccgccuacagcgcccacugcaucggcaucaccgacagagacuucaucgagggcgugcacggcggcaccugggugagcgccacccuggagcaggacaagugcgugaccgugauggcccccgacaagcccagccuggacaucagccuggagaccguggccaucgacagacccgccgaggugagaaaggugugcuacaacgccgugcugacccacgugaagaucaacgacaagugccccagcaccggcgaggcccaccuggccgaggagaacgagggcgacaacgccugcaagagaaccuacagcgacagaggcuggggcaacggcugcggccuguucggcaagggcagcaucguggccugcgccaaguucaccugcgccaagagcaugagccuguucgagguggaccagaccaagauccaguacgugaucagagcccagcugcacgugggcgccaagcaggagaacuggaacaccgacaucaagacccugaaguucgacgcccugagcggcagccaggagguggaguucaucggcuacggcaaggccacccuggagugccaggugcagaccgccguggacuucggcaacagcuacaucgccgagauggagaccgagagcuggaucguggacagacagugggcccaggaccugacccugcccuggcagagcggcagcggcggcguguggagagagaugcaccaccugguggaguucgagcccccccacgccgccaccaucagagugcuggcccugggcaaccaggagggcagccugaagaccgcccugaccggcgccaugagagugaccaaggacaccaacgacaacaaccuguacaagcugcacggcggccacgugagcugcagagugaagcugagcgcccugacccugaagggcaccagcuacaagaucugcaccgacaagauguucuucgugaagaaccccaccgacaccggccacggcaccguggugaugcaggugaaggugagcaagggcgcccccugcagaauccccgugaucguggccgacgaccugaccgccgccaucaacaagggcauccuggugaccgugaaccccaucgccagcaccaacgacgacgaggugcugaucgaggugaacccccccuucggcgacagcuacaucaucgugggcagaggcgacagcagacugaccuaccaguggcacaaggagggcagcagcaucggcaagcuguucacccagaccaugaagggcguggagagacuggccgugaugggcgacaccgccugggacuucagcagcgccggcggcuucuucaccagcgugggcaagggcauccacaccguguucggcagcgccuuccagggccuguucggcggccugaacuggaucaccaaggugaucaugggcgccgugcugaucugggugggcaucaacaccagaaacaugaccaugagcaugagcaugauccuggugggcgugaucaugauguuccugagccugggcgugggcgccgaccagggcugcgccaucaacuucggcaagugaggacuaguggaagcauuuuccuggcugauuaaaagaaauuacucagcuauggucaucuguuccuguuagaaggcuaugcagcauauuauauacuaugcgcauguuaugaaaugcauaauaaaaaauuuuaaaaaaucuaaaagaucuaaaaaaaaaaaaaaaaaaaaaaaaaaaaaaaaaaaaaaaaaaaaaaaaaaaaaaaaaaaaaaaaugcaucccccccccccccccccccccccccccccccaaaggcucuuuucagagccaccagaauu

SEQ ID NO: 1837 - RNA, 2525 nt, Artificial Sequence
  mRNA product Design d-5 comprising derived and/or modified sequence from YFV__NC_002031.1__X-SS-prMEdelstem_TM-JEV (polyprotein: aa92-681) (opt5)
gggagagggcgcuuggcuugcaaggacccugagcugcggcauugaagcacacccaacccaacucgacugaagucagccucacugaaccggaucugagaaucuucucucucugggcuugccagggcucuccgaaccuagcuagcauccucuucaauuccaacuagaaagcuuaccaugagaggccugagcucccggaagcgcagaucucacgacgugcucaccguccaguuccugauccuugggaugcugcucaugacaggaggcguuacgcuggugcggaaaaaccgcuggcuucugcucaaugugaccagcgaggaucuggggaagacauuuuccgucggaaccggcaacugcacaaccaauauucuggaagccaaauacuggugucccgacucuauggaguauaacugcccuaaucucagcccgagagaagaacccgaugacaucgauuguuggugcuacgggguggaaaacguucggguggcuuauggaaagugugacuccgccggccgcucuagacggagccgcagagcgauugaucugccuacacaugagaaucacggccuuaaaacccggcaagagaaguggaugacggggcgcaugggagaaagacagcugcagaagaucgagcggugguucguccgcaaccccuuuuucgcugugaccgcccucacaauugccuaccugguuggcuccaauaugacccagagaguggucaucgcccuucuggugcucgcuguggggccugcuuauagcgcccauugcaucggaauuacagaccgggauuuuaucgaaggcguccacgggggaaccuggguuucugcgacgcuggagcaagacaaaugugugacagugauggcccccgauaagccuucccuggacauuagccucgagaccgucgcuaucgauagaccggccgaagugcgcaaaguuugcuacaacgcugugcugacacaugucaagauuaaugacaaaugucccucuaccggcgaggcccaccuugcggaagagaacgaaggcgacaaugccugcaagcggaccuauuccgauagaggguggggaaacggcugugggcuguucggaaagggcagcaucguggcuugcgccaaauuuacaugcgcuaagucuaugucccucuucgagguugaccagacgaaaauucaguacgugauccgcgcccagcugcacgucggggccaagcaagagaauuggaacaccgauaucaaaacacuuaaguuugacgcucugagcggaucccaggaaguggaguucauuggcuacggcaaagcgacccucgaaugucagguccagacagccguggauuuugggaacucuuauaucgcugagauggaaaccgagagcuggauuguugaccggcaaugggcccaggaucugacgcugccuuggcaguccggaagcggcgggguguggagagagaugcaucaccucgucgaguucgagcccccucaugccgcuacaauccgcgugcuggcccuuggaaaucaagaaggcucucugaagaccgcgcucaccggggcuaugcggguuacaaaggacaccaacgauaauaaccuguacaaacuucacggcggacacguguccugcagagucaagcugagcgcccucacacugaaaggcacgucuuauaagauuuguaccgacaaaauguuuuucgugaagaaucccacagauaccgggcauggaacagugguuaugcaggucaaggugagcaaaggcgccccgugccgcaucccugugaucgucgcugacgaccugaccgccgcuauuaacaaggggauccucgugacgguuaaucccauugccuccaccaacgaugacgaggugcugaucgaagucaauccucccuucggagauucuuacauuaucgugggccggggagacagcagacuuacauaucaguggcacaaagagggcuccagcaucggcagcacccuggggaaggccuucuccacaacgcucaaaggagcucagagacuggccgcgcuuggcgacaccgcuugggauuuugggucuaucggaggcguguucaacagcauugggcgggccguccaccaaguuuuuggaggcgccuuccgcacacuguuuggcgggauguccuggaucacccagggacucaugggcgcucugcuucuguggaugggggugaaugccagagaccggucuauugcucucgccuuccuggcgacaggaggcgugcuggucuuucucgccaccaacgugcaugcuugaggacuaguggaagcauuuuccuggcugauuaaaagaaauuacucagcuauggucaucuguuccuguuagaaggcuaugcagcauauuauauacuaugcgcauguuaugaaaugcauaauaaaaaauuuuaaaaaaucuaaaagaucuaaaaaaaaaaaaaaaaaaaaaaaaaaaaaaaaaaaaaaaaaaaaaaaaaaaaaaaaaaaaaaaaugcaucccccccccccccccccccccccccccccccaaaggcucuuuucagagccaccagaauu

SEQ ID NO: 1838 - RNA, 2498 nt, Artificial Sequence
  mRNA product Design d-5 comprising derived and/or modified sequence from YFV__NC_002031.1__SSjev(V3)-prMEdelstem_TM-JEV (polyprotein: aa122-681) (opt5)
gggagagggcgcuuggcuugcaaggacccugagcugcggcauugaagcacacccaacccaacucgacugaagucagccucacugaaccggaucugagaaucuucucucucugggcuugccagggcucuccgaaccuagcuagcauccucuucaauuccaacuagaaagcuuaccaugaacgagggcagcaucauguggcuggccucccucgcuguggucauugccugcgcgggggcuguuacgcuggugcggaaaaaccgcuggcuucugcucaaugugaccagcgaggaucuggggaagacauuuuccgucggaaccggcaacugcacaaccaauauucuggaagccaaauacuggugucccgacucuauggaguauaacugcccuaaucucagcccgagagaagaacccgaugacaucgauuguuggugcuacgggguggaaaacguucggguggcuuauggaaagugugacuccgccggccgcucuagacggagccgcagagcgauugaucugccuacacaugagaaucacggccuuaaaacccggcaagagaaguggaugacggggcgcaugggagaaagacagcugcagaagaucgagcggugguucguccgcaaccccuuuuucgcugugaccgcccucacaauugccuaccugguuggcuccaauaugacccagagaguggucaucgcccuucuggugcucgcuguggggccugcuuauagcgcccauugcaucggaauuacagaccgggauuuuaucgaaggcguccacgggggaaccuggguuucugcgacgcuggagcaagacaaaugugugacagugauggcccccgauaagccuucccuggacauuagccucgagaccgucgcuaucgauagaccggccgaagugcgcaaaguuugcuacaacgcugugcugacacaugucaagauuaaugacaaaugucccucuaccggcgaggcccaccuugcggaagagaacgaaggcgacaaugccugcaagcggaccuauuccgauagaggguggggaaacggcugugggcuguucggaaagggcagcaucguggcuugcgccaaauuuacaugcgcuaagucuaugucccucuucgagguugaccagacgaaaauucaguacgugauccgcgcccagcugcacgucggggccaagcaagagaauuggaacaccgauaucaaaacacuuaaguuugacgcucugagcggaucccaggaaguggaguucauuggcuacggcaaagcgacccucgaaugucagguccagacagccguggauuuugggaacucuuauaucgcugagauggaaaccgagagcuggauuguugaccggcaaugggcccaggaucugacgcugccuuggcaguccggaagcggcgggguguggagagagaugcaucaccucgucgaguucgagcccccucaugccgcuacaauccgcgugcuggcccuuggaaaucaagaaggcucucugaagaccgcgcucaccggggcuaugcggguuacaaaggacaccaacgauaauaaccuguacaaacuucacggcggacacguguccugcagagucaagcugagcgcccucacacugaaaggcacgucuuauaagauuuguaccgacaaaauguuuuucgugaagaaucccacagauaccgggcauggaacagugguuaugcaggucaaggugagcaaaggcgccccgugccgcaucccugugaucgucgcugacgaccugaccgccgcuauuaacaaggggauccucgugacgguuaaucccauugccuccaccaacgaugacgaggugcugaucgaagucaauccucccuucggagauucuuacauuaucgugggccggggagacagcagacuuacauaucaguggcacaaagagggcuccagcaucggcagcacccuggggaaggccuucuccacaacgcucaaaggagcucagagacuggccgcgcuuggcgacaccgcuugggauuuugggucuaucggaggcguguucaacagcauugggcgggccguccaccaaguuuuuggaggcgccuuccgcacacuguuuggcgggauguccuggaucacccagggacucaugggcgcucugcuucuguggaugggggugaaugccagagaccggucuauugcucucgccuuccuggcgacaggaggcgugcuggucuuucucgccaccaacgugcaugcuugaggacuaguggaagcauuuuccuggcugauuaaaagaaauuacucagcuauggucaucuguuccuguuagaaggcuaugcagcauauuauauacuaugcgcauguuaugaaaugcauaauaaaaaauuuuaaaaaaucuaaaagaucuaaaaaaaaaaaaaaaaaaaaaaaaaaaaaaaaaaaaaaaaaaaaaaaaaaaaaaaaaaaaaaaaugcaucccccccccccccccccccccccccccccccaaaggcucuuuucagagccaccagaauu

SEQ ID NO: 1839 - RNA, 2513 nt, Artificial Sequence
  mRNA product Design d-5 comprising derived and/or modified sequence from YFV__NC_002031.1__X-SS-prME (polyprotein: aa92-778) (opt5)
gggagagggcgcuuggcuugcaaggacccugagcugcggcauugaagcacacccaacccaacucgacugaagucagccucacugaaccggaucugagaaucuucucucucugggcuugccagggcucuccgaaccuagcuagcauccucuucaauuccaacuagaaagcuuaccaugagaggccugagcucccggaagcgcagaucucacgacgugcucaccguccaguuccugauccuugggaugcugcucaugacaggaggcguuacgcuggugcggaaaaaccgcuggcuucugcucaaugugaccagcgaggaucuggggaagacauuuuccgucggaaccggcaacugcacaaccaauauucuggaagccaaauacuggugucccgacucuauggaguauaacugcccuaaucucagcccgagagaagaacccgaugacaucgauuguuggugcuacgggguggaaaacguucggguggcuuauggaaagugugacuccgccggccgcucuagacggagccgcagagcgauugaucugccuacacaugagaaucacggccuuaaaacccggcaagagaaguggaugacggggcgcaugggagaaagacagcugcagaagaucgagcggugguucguccgcaaccccuuuuucgcugugaccgcccucacaauugccuaccugguuggcuccaauaugacccagagaguggucaucgcccuucuggugcucgcuguggggccugcuuauagcgcccauugcaucggaauuacagaccgggauuuuaucgaaggcguccacgggggaaccuggguuucugcgacgcuggagcaagacaaaugugugacagugauggcccccgauaagccuucccuggacauuagccucgagaccgucgcuaucgauagaccggccgaagugcgcaaaguuugcuacaacgcugugcugacacaugucaagauuaaugacaaaugucccucuaccggcgaggcccaccuugcggaagagaacgaaggcgacaaugccugcaagcggaccuauuccgauagaggguggggaaacggcugugggcuguucggaaagggcagcaucguggcuugcgccaaauuuacaugcgcuaagucuaugucccucuucgagguugaccagacgaaaauucaguacgugauccgcgcccagcugcacgucggggccaagcaagagaauuggaacaccgauaucaaaacacuuaaguuugacgcucugagcggaucccaggaaguggaguucauuggcuacggcaaagcgacccucgaaugucagguccagacagccguggauuuugggaacucuuauaucgcugagauggaaaccgagagcuggauuguugaccggcaaugggcccaggaucugacgcugccuuggcaguccggaagcggcgggguguggagagagaugcaucaccucgucgaguucgagcccccucaugccgcuacaauccgcgugcuggcccuuggaaaucaagaaggcucucugaagaccgcgcucaccggggcuaugcggguuacaaaggacaccaacgauaauaaccuguacaaacuucacggcggacacguguccugcagagucaagcugagcgcccucacacugaaaggcacgucuuauaagauuuguaccgacaaaauguuuuucgugaagaaucccacagauaccgggcauggaacagugguuaugcaggucaaggugagcaaaggcgccccgugccgcaucccugugaucgucgcugacgaccugaccgccgcuauuaacaaggggauccucgugacgguuaaucccauugccuccaccaacgaugacgaggugcugaucgaagucaauccucccuucggagauucuuacauuaucgugggccggggagacagcagacuuacauaucaguggcacaaagagggcuccagcaucggaaagcuguuuacccagacaaugaaaggcguugagcgccucgcggugaugggggauaccgccugggacuucucuuccgcuggaggcuuuuucacgagcgucgggaaggggauucauacaguguuuggcucugccuuccaagggcuguuuggcggacugaacuggaucaccaagguuauuaugggcgcugugcuuaucugggucgggauuaauacacggaacaugaccauguccaugagcaugauccucgugggagugauuaugauguuccugucccugggcgucggggccugaggacuaguggaagcauuuuccuggcugauuaaaagaaauuacucagcuauggucaucuguuccuguuagaaggcuaugcagcauauuauauacuaugcgcauguuaugaaaugcauaauaaaaaauuuuaaaaaaucuaaaagaucuaaaaaaaaaaaaaaaaaaaaaaaaaaaaaaaaaaaaaaaaaaaaaaaaaaaaaaaaaaaaaaaaugcaucccccccccccccccccccccccccccccccaaaggcucuuuucagagccaccagaauu

SEQ ID NO: 1840 - RNA, 2516 nt, Artificial Sequence
  mRNA product Design d-5 comprising derived and/or modified sequence from YFV__NC_002031.1__SSjev(V3)-prME-XX (polyprotein: aa122-788) (opt5)
gggagagggcgcuuggcuugcaaggacccugagcugcggcauugaagcacacccaacccaacucgacugaagucagccucacugaaccggaucugagaaucuucucucucugggcuugccagggcucuccgaaccuagcuagcauccucuucaauuccaacuagaaagcuuaccaugaacgagggcagcaucauguggcuggccucccucgcuguggucauugccugcgcgggggcuguuacgcuggugcggaaaaaccgcuggcuucugcucaaugugaccagcgaggaucuggggaagacauuuuccgucggaaccggcaacugcacaaccaauauucuggaagccaaauacuggugucccgacucuauggaguauaacugcccuaaucucagcccgagagaagaacccgaugacaucgauuguuggugcuacgggguggaaaacguucggguggcuuauggaaagugugacuccgccggccgcucuagacggagccgcagagcgauugaucugccuacacaugagaaucacggccuuaaaacccggcaagagaaguggaugacggggcgcaugggagaaagacagcugcagaagaucgagcggugguucguccgcaaccccuuuuucgcugugaccgcccucacaauugccuaccugguuggcuccaauaugacccagagaguggucaucgcccuucuggugcucgcuguggggccugcuuauagcgcccauugcaucggaauuacagaccgggauuuuaucgaaggcguccacgggggaaccuggguuucugcgacgcuggagcaagacaaaugugugacagugauggcccccgauaagccuucccuggacauuagccucgagaccgucgcuaucgauagaccggccgaagugcgcaaaguuugcuacaacgcugugcugacacaugucaagauuaaugacaaaugucccucuaccggcgaggcccaccuugcggaagagaacgaaggcgacaaugccugcaagcggaccuauuccgauagaggguggggaaacggcugugggcuguucggaaagggcagcaucguggcuugcgccaaauuuacaugcgcuaagucuaugucccucuucgagguugaccagacgaaaauucaguacgugauccgcgcccagcugcacgucggggccaagcaagagaauuggaacaccgauaucaaaacacuuaaguuugacgcucugagcggaucccaggaaguggaguucauuggcuacggcaaagcgacccucgaaugucagguccagacagccguggauuuugggaacucuuauaucgcugagauggaaaccgagagcuggauuguugaccggcaaugggcccaggaucugacgcugccuuggcaguccggaagcggcgggguguggagagagaugcaucaccucgucgaguucgagcccccucaugccgcuacaauccgcgugcuggcccuuggaaaucaagaaggcucucugaagaccgcgcucaccggggcuaugcggguuacaaaggacaccaacgauaauaaccuguacaaacuucacggcggacacguguccugcagagucaagcugagcgcccucacacugaaaggcacgucuuauaagauuuguaccgacaaaauguuuuucgugaagaaucccacagauaccgggcauggaacagugguuaugcaggucaaggugagcaaaggcgccccgugccgcaucccugugaucgucgcugacgaccugaccgccgcuauuaacaaggggauccucgugacgguuaaucccauugccuccaccaacgaugacgaggugcugaucgaagucaauccucccuucggagauucuuacauuaucgugggccggggagacagcagacuuacauaucaguggcacaaagagggcuccagcaucggaaagcuguuuacccagacaaugaaaggcguugagcgccucgcggugaugggggauaccgccugggacuucucuuccgcuggaggcuuuuucacgagcgucgggaaggggauucauacaguguuuggcucugccuuccaagggcuguuuggcggacugaacuggaucaccaagguuauuaugggcgcugugcuuaucugggucgggauuaauacacggaacaugaccauguccaugagcaugauccucgugggagugauuaugauguuccugucccugggcgucggggccgaucagggaugugcgaucaauuuuggcaaaugaggacuaguggaagcauuuuccuggcugauuaaaagaaauuacucagcuauggucaucuguuccuguuagaaggcuaugcagcauauuauauacuaugcgcauguuaugaaaugcauaauaaaaaauuuuaaaaaaucuaaaagaucuaaaaaaaaaaaaaaaaaaaaaaaaaaaaaaaaaaaaaaaaaaaaaaaaaaaaaaaaaaaaaaaaugcaucccccccccccccccccccccccccccccccaaaggcucuuuucagagccaccagaauu

SEQ ID NO: 1841 - RNA, 2525 nt, Artificial Sequence
  mRNA product Design d-5 comprising derived and/or modified sequence from YFV__NC_002031.1__X-SS-prMEdelstem_TM-JEV (polyprotein: aa92-681) (opt6)
gggagagggcgcuuggcuugcaaggacccugagcugcggcauugaagcacacccaacccaacucgacugaagucagccucacugaaccggaucugagaaucuucucucucugggcuugccagggcucuccgaaccuagcuagcauccucuucaauuccaacuagaaagcuuaccaugagaggauuaucaaguagaaaaagaagaucacaugauguacuaaccgugcaauuuuugaucuuagggaugcucuuaaugacaggagguguuacauuaguaagaaagaaucgauggcugcuuuuaaaugugacaucagaggauuuagggaaaacauuuucgguaggaacaggaaauuguacuacaaauauacuugaagcaaaauauuggugcccagacucuauggaauauaauuguccaaauuuaaguccuagagaagaaccugacgauauagauuguugguguuaugguguagaaaauguaagaguagcauacggcaaaugcgauagugcaggacguucuagacguucaaggagagccauagaucugcccacucacgaaaaucacggauugaaaacacgacaagaaaaauggaugacugggcgaaugggagaaagacaacuacagaaaauugaaagaugguucguuagaaauccauucuuugccguaacagcuuuaacaauagccuauuuaguagguaguaauaugacacaaagaguaguaauagcauugcuaguguuagcaguuggaccagcuuauagugcacauugcauaggaauaacagauagagacuuuauagaaggaguacacgggggaacuuggguaagugccacuuuagaacaagauaaauguguuacagugauggcgccagauaaaccaagucuggacauaaguuuggaaacaguagcgauugauagacccgcagaaguaagaaaaguuuguuauaaugcuguucuaacccauguuaaaauaaaugauaaaugcccuagcaccggagaagcccaucuagcagaagaaaaugaaggagauaacgcauguaaacgaacauacucagauagaggauggggcaacggauguggcuuguuuggaaaagguagcauaguagcaugcgcuaaauuuacaugcgcaaagucaaugucauuauuugaaguagaucaaacaaaaauacaauauguaauaagagcucaauuacacgugggugcaaaacaagaaaauuggaauacagacauaaagacacuaaaguucgacgcauuaaguggaucacaagagguagaauuuauaggguacggaaaagcgacuuuagagugucaaguccaaacagcaguagauuucgguaacucauacauagcagaaauggaaacugaaaguuggauaguagauagacaaugggcacaagacuugacacuaccuuggcaaucaggaagcggaggaguauggagagaaaugcaucauuuaguagaauuugaaccaccucaugcagcaacaauaagaguauuagcccuaggaaaccaagaaggaaguuuaaaaacagcacuaacaggagcuaugagaguaacaaaagauacaaaugacaacaaucuauacaaauuacacggaggacauguaagcugccggguaaaguugagcgcacuaacauuaaaaggaacgaguuauaaaauaugcacagauaaaauguucuuuguuaaaaauccuacagauaccggucauggaacaguaguaaugcaaguaaaaguaaguaaaggcgcucccuguagaauaccuguaauagucgcagacgauuuaaccgcagcaauaaauaaaggaauauuagucacgguaaacccaauagcgucaacaaaugaugaugaaguauuaauagaaguuaacccaccuuuuggagacaguuauauaauagucggaaggggugauaguagacuaacauaccaauggcauaaagaaggaagcucaauaggaaguacacuaggaaaagcauuuaguacaacauuaaaaggagcacaaagauuagcagcauuaggagauacagcaugggauuuuggaagcauaggaggaguauuuaauaguauagguagagcaguacaucaaguauuuggaggagcauuuagaacauuauuuggaggaaugaguuggauaacacaaggauuaaugggagcauuauuauuauggaugggaguaaaugcaagagauagaaguauagcauuagcauuuuuagcaacaggaggaguauuaguauuuuuagcaacaaauguacaugcaugaggacuaguggaagcauuuuccuggcugauuaaaagaaauuacucagcuauggucaucuguuccuguuagaaggcuaugcagcauauuauauacuaugcgcauguuaugaaaugcauaauaaaaaauuuuaaaaaaucuaaaagaucuaaaaaaaaaaaaaaaaaaaaaaaaaaaaaaaaaaaaaaaaaaaaaaaaaaaaaaaaaaaaaaaaugcaucccccccccccccccccccccccccccccccaaaggcucuuuucagagccaccagaauu

SEQ ID NO: 1842 - RNA, 2498 nt, Artificial Sequence
  mRNA product Design d-5 comprising derived and/or modified sequence from YFV__NC_002031.1__SSjev(V3)-prMEdelstem_TM-JEV (polyprotein: aa122-681) (opt6)
gggagagggcgcuuggcuugcaaggacccugagcugcggcauugaagcacacccaacccaacucgacugaagucagccucacugaaccggaucugagaaucuucucucucugggcuugccagggcucuccgaaccuagcuagcauccucuucaauuccaacuagaaagcuuaccaugaaugaagguucaauuaugugguuggcaucauuagcaguuguaauugcaugugcuggugcaguuacauuaguaagaaagaaucgauggcugcuuuuaaaugugacaucagaggauuuagggaaaacauuuucgguaggaacaggaaauuguacuacaaauauacuugaagcaaaauauuggugcccagacucuauggaauauaauuguccaaauuuaaguccuagagaagaaccugacgauauagauuguugguguuaugguguagaaaauguaagaguagcauacggcaaaugcgauagugcaggacguucuagacguucaaggagagccauagaucugcccacucacgaaaaucacggauugaaaacacgacaagaaaaauggaugacugggcgaaugggagaaagacaacuacagaaaauugaaagaugguucguuagaaauccauucuuugccguaacagcuuuaacaauagccuauuuaguagguaguaauaugacacaaagaguaguaauagcauugcuaguguuagcaguuggaccagcuuauagugcacauugcauaggaauaacagauagagacuuuauagaaggaguacacgggggaacuuggguaagugccacuuuagaacaagauaaauguguuacagugauggcgccagauaaaccaagucuggacauaaguuuggaaacaguagcgauugauagacccgcagaaguaagaaaaguuuguuauaaugcuguucuaacccauguuaaaauaaaugauaaaugcccuagcaccggagaagcccaucuagcagaagaaaaugaaggagauaacgcauguaaacgaacauacucagauagaggauggggcaacggauguggcuuguuuggaaaagguagcauaguagcaugcgcuaaauuuacaugcgcaaagucaaugucauuauuugaaguagaucaaacaaaaauacaauauguaauaagagcucaauuacacgugggugcaaaacaagaaaauuggaauacagacauaaagacacuaaaguucgacgcauuaaguggaucacaagagguagaauuuauaggguacggaaaagcgacuuuagagugucaaguccaaacagcaguagauuucgguaacucauacauagcagaaauggaaacugaaaguuggauaguagauagacaaugggcacaagacuugacacuaccuuggcaaucaggaagcggaggaguauggagagaaaugcaucauuuaguagaauuugaaccaccucaugcagcaacaauaagaguauuagcccuaggaaaccaagaaggaaguuuaaaaacagcacuaacaggagcuaugagaguaacaaaagauacaaaugacaacaaucuauacaaauuacacggaggacauguaagcugccggguaaaguugagcgcacuaacauuaaaaggaacgaguuauaaaauaugcacagauaaaauguucuuuguuaaaaauccuacagauaccggucauggaacaguaguaaugcaaguaaaaguaaguaaaggcgcucccuguagaauaccuguaauagucgcagacgauuuaaccgcagcaauaaauaaaggaauauuagucacgguaaacccaauagcgucaacaaaugaugaugaaguauuaauagaaguuaacccaccuuuuggagacaguuauauaauagucggaaggggugauaguagacuaacauaccaauggcauaaagaaggaagcucaauaggaaguacacuaggaaaagcauuuaguacaacauuaaaaggagcacaaagauuagcagcauuaggagauacagcaugggauuuuggaagcauaggaggaguauuuaauaguauagguagagcaguacaucaaguauuuggaggagcauuuagaacauuauuuggaggaaugaguuggauaacacaaggauuaaugggagcauuauuauuauggaugggaguaaaugcaagagauagaaguauagcauuagcauuuuuagcaacaggaggaguauuaguauuuuuagcaacaaauguacaugcaugaggacuaguggaagcauuuuccuggcugauuaaaagaaauuacucagcuauggucaucuguuccuguuagaaggcuaugcagcauauuauauacuaugcgcauguuaugaaaugcauaauaaaaaauuuuaaaaaaucuaaaagaucuaaaaaaaaaaaaaaaaaaaaaaaaaaaaaaaaaaaaaaaaaaaaaaaaaaaaaaaaaaaaaaaaugcaucccccccccccccccccccccccccccccccaaaggcucuuuucagagccaccagaauu

SEQ ID NO: 1843 - RNA, 2513 nt, Artificial Sequence
  mRNA product Design d-5 comprising derived and/or modified sequence from YFV__NC_002031.1__X-SS-prME (polyprotein: aa92-778) (opt6)
gggagagggcgcuuggcuugcaaggacccugagcugcggcauugaagcacacccaacccaacucgacugaagucagccucacugaaccggaucugagaaucuucucucucugggcuugccagggcucuccgaaccuagcuagcauccucuucaauuccaacuagaaagcuuaccaugagaggauuaucaaguagaaaaagaagaucacaugauguacuaaccgugcaauuuuugaucuuagggaugcucuuaaugacaggagguguuacauuaguaagaaagaaucgauggcugcuuuuaaaugugacaucagaggauuuagggaaaacauuuucgguaggaacaggaaauuguacuacaaauauacuugaagcaaaauauuggugcccagacucuauggaauauaauuguccaaauuuaaguccuagagaagaaccugacgauauagauuguugguguuaugguguagaaaauguaagaguagcauacggcaaaugcgauagugcaggacguucuagacguucaaggagagccauagaucugcccacucacgaaaaucacggauugaaaacacgacaagaaaaauggaugacugggcgaaugggagaaagacaacuacagaaaauugaaagaugguucguuagaaauccauucuuugccguaacagcuuuaacaauagccuauuuaguagguaguaauaugacacaaagaguaguaauagcauugcuaguguuagcaguuggaccagcuuauagugcacauugcauaggaauaacagauagagacuuuauagaaggaguacacgggggaacuuggguaagugccacuuuagaacaagauaaauguguuacagugauggcgccagauaaaccaagucuggacauaaguuuggaaacaguagcgauugauagacccgcagaaguaagaaaaguuuguuauaaugcuguucuaacccauguuaaaauaaaugauaaaugcccuagcaccggagaagcccaucuagcagaagaaaaugaaggagauaacgcauguaaacgaacauacucagauagaggauggggcaacggauguggcuuguuuggaaaagguagcauaguagcaugcgcuaaauuuacaugcgcaaagucaaugucauuauuugaaguagaucaaacaaaaauacaauauguaauaagagcucaauuacacgugggugcaaaacaagaaaauuggaauacagacauaaagacacuaaaguucgacgcauuaaguggaucacaagagguagaauuuauaggguacggaaaagcgacuuuagagugucaaguccaaacagcaguagauuucgguaacucauacauagcagaaauggaaacugaaaguuggauaguagauagacaaugggcacaagacuugacacuaccuuggcaaucaggaagcggaggaguauggagagaaaugcaucauuuaguagaauuugaaccaccucaugcagcaacaauaagaguauuagcccuaggaaaccaagaaggaaguuuaaaaacagcacuaacaggagcuaugagaguaacaaaagauacaaaugacaacaaucuauacaaauuacacggaggacauguaagcugccggguaaaguugagcgcacuaacauuaaaaggaacgaguuauaaaauaugcacagauaaaauguucuuuguuaaaaauccuacagauaccggucauggaacaguaguaaugcaaguaaaaguaaguaaaggcgcucccuguagaauaccuguaauagucgcagacgauuuaaccgcagcaauaaauaaaggaauauuagucacgguaaacccaauagcgucaacaaaugaugaugaaguauuaauagaaguuaacccaccuuuuggagacaguuauauaauagucggaaggggugauaguagacuaacauaccaauggcauaaagaaggaagcucaauaggaaaauuauuuacucaaaccaugaaagguguagaaaggcuagcuguuaugggugacacagcaugggauuuuucaagcgcaggaggguucuuuacaucaguagguaaaggaauacauacaguauuuggaagugcauuucaaggauuauuuggugguuuaaauuggauaacaaaaguaauaaugggcgcaguuuuaauauggguagguauaaacacaagaaauaugacaaugucuaugaguaugauauuggucggaguaauaaugauguuuuuaucacuaggagugggugcaugaggacuaguggaagcauuuuccuggcugauuaaaagaaauuacucagcuauggucaucuguuccuguuagaaggcuaugcagcauauuauauacuaugcgcauguuaugaaaugcauaauaaaaaauuuuaaaaaaucuaaaagaucuaaaaaaaaaaaaaaaaaaaaaaaaaaaaaaaaaaaaaaaaaaaaaaaaaaaaaaaaaaaaaaaaugcaucccccccccccccccccccccccccccccccaaaggcucuuuucagagccaccagaauu

SEQ ID NO: 1844 - RNA, 2516 nt, Artificial Sequence
  mRNA product Design d-5 comprising derived and/or modified sequence from YFV__NC_002031.1__SSjev(V3)-prME-XX (polyprotein: aa122-788) (opt6)
gggagagggcgcuuggcuugcaaggacccugagcugcggcauugaagcacacccaacccaacucgacugaagucagccucacugaaccggaucugagaaucuucucucucugggcuugccagggcucuccgaaccuagcuagcauccucuucaauuccaacuagaaagcuuaccaugaaugaagguucaauuaugugguuggcaucauuagcaguuguaauugcaugugcuggugcaguuacauuaguaagaaagaaucgauggcugcuuuuaaaugugacaucagaggauuuagggaaaacauuuucgguaggaacaggaaauuguacuacaaauauacuugaagcaaaauauuggugcccagacucuauggaauauaauuguccaaauuuaaguccuagagaagaaccugacgauauagauuguugguguuaugguguagaaaauguaagaguagcauacggcaaaugcgauagugcaggacguucuagacguucaaggagagccauagaucugcccacucacgaaaaucacggauugaaaacacgacaagaaaaauggaugacugggcgaaugggagaaagacaacuacagaaaauugaaagaugguucguuagaaauccauucuuugccguaacagcuuuaacaauagccuauuuaguagguaguaauaugacacaaagaguaguaauagcauugcuaguguuagcaguuggaccagcuuauagugcacauugcauaggaauaacagauagagacuuuauagaaggaguacacgggggaacuuggguaagugccacuuuagaacaagauaaauguguuacagugauggcgccagauaaaccaagucuggacauaaguuuggaaacaguagcgauugauagacccgcagaaguaagaaaaguuuguuauaaugcuguucuaacccauguuaaaauaaaugauaaaugcccuagcaccggagaagcccaucuagcagaagaaaaugaaggagauaacgcauguaaacgaacauacucagauagaggauggggcaacggauguggcuuguuuggaaaagguagcauaguagcaugcgcuaaauuuacaugcgcaaagucaaugucauuauuugaaguagaucaaacaaaaauacaauauguaauaagagcucaauuacacgugggugcaaaacaagaaaauuggaauacagacauaaagacacuaaaguucgacgcauuaaguggaucacaagagguagaauuuauaggguacggaaaagcgacuuuagagugucaaguccaaacagcaguagauuucgguaacucauacauagcagaaauggaaacugaaaguuggauaguagauagacaaugggcacaagacuugacacuaccuuggcaaucaggaagcggaggaguauggagagaaaugcaucauuuaguagaauuugaaccaccucaugcagcaacaauaagaguauuagcccuaggaaaccaagaaggaaguuuaaaaacagcacuaacaggagcuaugagaguaacaaaagauacaaaugacaacaaucuauacaaauuacacggaggacauguaagcugccggguaaaguugagcgcacuaacauuaaaaggaacgaguuauaaaauaugcacagauaaaauguucuuuguuaaaaauccuacagauaccggucauggaacaguaguaaugcaaguaaaaguaaguaaaggcgcucccuguagaauaccuguaauagucgcagacgauuuaaccgcagcaauaaauaaaggaauauuagucacgguaaacccaauagcgucaacaaaugaugaugaaguauuaauagaaguuaacccaccuuuuggagacaguuauauaauagucggaaggggugauaguagacuaacauaccaauggcauaaagaaggaagcucaauaggaaaauuauuuacucaaaccaugaaagguguagaaaggcuagcuguuaugggugacacagcaugggauuuuucaagcgcaggaggguucuuuacaucaguagguaaaggaauacauacaguauuuggaagugcauuucaaggauuauuuggugguuuaaauuggauaacaaaaguaauaaugggcgcaguuuuaauauggguagguauaaacacaagaaauaugacaaugucuaugaguaugauauuggucggaguaauaaugauguuuuuaucacuaggagugggugcagaucaagguugcgcuauuaauuuuggaaaaugaggacuaguggaagcauuuuccuggcugauuaaaagaaauuacucagcuauggucaucuguuccuguuagaaggcuaugcagcauauuauauacuaugcgcauguuaugaaaugcauaauaaaaaauuuuaaaaaaucuaaaagaucuaaaaaaaaaaaaaaaaaaaaaaaaaaaaaaaaaaaaaaaaaaaaaaaaaaaaaaaaaaaaaaaaugcaucccccccccccccccccccccccccccccccaaaggcucuuuucagagccaccagaauu

SEQ ID NO: 1845 - RNA, 2525 nt, Artificial Sequence
  mRNA product Design d-5 comprising derived and/or modified sequence from YFV__NC_002031.1__X-SS-prMEdelstem_TM-JEV (polyprotein: aa92-681) (opt11)
gggagagggcgcuuggcuugcaaggacccugagcugcggcauugaagcacacccaacccaacucgacugaagucagccucacugaaccggaucugagaaucuucucucucugggcuugccagggcucuccgaaccuagcuagcauccucuucaauuccaacuagaaagcuuaccaugcggggacuaagcagcagaaaaagacgcagccacgaugugcucaccgugcaauuccucauacuggggaugcuccuaaugaccggaggcgugacccuaguaaggaaaaacagauggcuacuacuaaacguaaccucagaagaucuaggaaagacauuuucagucggcacaggcaacugcacaaccaacauacuagaagcaaaauauuggugcccagacagcauggaauacaacugucccaaccucagcccaagagaggaaccagacgacauagacugcugguguuacggaguagaaaacguaagaguggcauacggcaaaugcgacagcgcaggcaggagccgaagaucccgcagagccaucgacuugcccacgcacgaaaaccacggccucaaaacacgacaagaaaaauggaugacagggcgaaugggagaacgacagcuccagaaaauagaacgaugguucguccggaacccguucuucgcaguaacggcacuaacaaucgcauaccucguaggcagcaacaugacacaaagaguggucaucgcgcuacucguacuagcaguggggcccgcauacagugcacacugcauaggaaucacagaccgugacuucaucgaaggcguacacggaggaacguggguaagcgcgacacuggaacaagacaaaugcgugacaguaauggcaccagacaaaccaagccuagacauaucccuagaaacggucgccaucgaccgucccgcagaaguacgaaagguaugcuauaaugcaguccucacacacgucaaaauaaacgacaaaugccccagcacgggcgaagcacaccucgccgaagaaaacgaaggggauaacgcgugcaaacgcaccuacuccgacaggggauggggcaacggaugcggacuguucggaaaaggauccauagucgcaugcgcaaaauuuaccugcgcaaaaagcaugagcuuguucgagguagaccaaacgaagauccaauacguaauccgagcucaacuacacguuggggccaagcaagagaacuggaauacggacaucaaaacacuaaaauucgacgcacucuccggcucacaagaagucgaguucaucggcuacggcaaagcaacacuagaaugccaaguacaaacagcgguggacuucggcaacagcuacauagcagaaauggaaacagaaagcuggauaguagaccgacaaugggcacaagaccuaacucugccauggcaaagcggcucaggaggaguguggagagagaugcaccaccugguagaguucgaacccccacacgcagcaacaauaaggguacuggcacuaggcaaccaagaaggcagccuaaaaaccgcacucacaggagccaugcgcgugacgaaggacaccaacgacaacaaccucuacaaacuccacggagggcacguauccugccgcguaaaacuaucagcacuaacgcuaaaaggaacaagcuacaaaauaugcacagacaaaauguucuucgucaaaaaccccacagacacaggccacggcacagucguaaugcaagugaaggucagcaagggggcccccugccgaaucccagucauaguggcagacgaccucacggccgccaucaacaaagggauccugguaacagugaacccaauagcaucgaccaacgacgacgaaguccucauagaagugaaucccccguucggcgacagcuacaucaucguaggacgcggcgacucccgacugacguaccaauggcauaaagaaggcagcagcauugggagcacgcucgggaaagcguucucgaccacgcucaagggcgcgcaaaggcucgcggccuugggcgauaccgcgugggauuucgggagcauaggcggggucuuuaacucgaucgggcgcgcgguccaucaaguguucgggggcgcguucaggaccuuguucgggggcaugagcuggaucacgcaagggcucaugggcgcgcucuugcucuggaugggggucaaugccagggacaggagcauagccuuggccuuucucgcgaccgggggcgugcucguguucuuggccacgaacgugcacgcgugaggacuaguggaagcauuuuccuggcugauuaaaagaaauuacucagcuauggucaucuguuccuguuagaaggcuaugcagcauauuauauacuaugcgcauguuaugaaaugcauaauaaaaaauuuuaaaaaaucuaaaagaucuaaaaaaaaaaaaaaaaaaaaaaaaaaaaaaaaaaaaaaaaaaaaaaaaaaaaaaaaaaaaaaaaugcaucccccccccccccccccccccccccccccccaaaggcucuuuucagagccaccagaauu

SEQ ID NO: 1846 - RNA, 2498 nt, Artificial Sequence
  mRNA product Design d-5 comprising derived and/or modified sequence from YFV__NC_002031.1__SSjev(V3)-prMEdelstem_TM-JEV (polyprotein: aa122-681) (opt11)
gggagagggcgcuuggcuugcaaggacccugagcugcggcauugaagcacacccaacccaacucgacugaagucagccucacugaaccggaucugagaaucuucucucucugggcuugccagggcucuccgaaccuagcuagcauccucuucaauuccaacuagaaagcuuaccaugaacgagggcucgaucaugugguuggccucgcucgcggucgugaucgcgugcgcgggcgcggugacccuaguaaggaaaaacagauggcuacuacuaaacguaaccucagaagaucuaggaaagacauuuucagucggcacaggcaacugcacaaccaacauacuagaagcaaaauauuggugcccagacagcauggaauacaacugucccaaccucagcccaagagaggaaccagacgacauagacugcugguguuacggaguagaaaacguaagaguggcauacggcaaaugcgacagcgcaggcaggagccgaagaucccgcagagccaucgacuugcccacgcacgaaaaccacggccucaaaacacgacaagaaaaauggaugacagggcgaaugggagaacgacagcuccagaaaauagaacgaugguucguccggaacccguucuucgcaguaacggcacuaacaaucgcauaccucguaggcagcaacaugacacaaagaguggucaucgcgcuacucguacuagcaguggggcccgcauacagugcacacugcauaggaaucacagaccgugacuucaucgaaggcguacacggaggaacguggguaagcgcgacacuggaacaagacaaaugcgugacaguaauggcaccagacaaaccaagccuagacauaucccuagaaacggucgccaucgaccgucccgcagaaguacgaaagguaugcuauaaugcaguccucacacacgucaaaauaaacgacaaaugccccagcacgggcgaagcacaccucgccgaagaaaacgaaggggauaacgcgugcaaacgcaccuacuccgacaggggauggggcaacggaugcggacuguucggaaaaggauccauagucgcaugcgcaaaauuuaccugcgcaaaaagcaugagcuuguucgagguagaccaaacgaagauccaauacguaauccgagcucaacuacacguuggggccaagcaagagaacuggaauacggacaucaaaacacuaaaauucgacgcacucuccggcucacaagaagucgaguucaucggcuacggcaaagcaacacuagaaugccaaguacaaacagcgguggacuucggcaacagcuacauagcagaaauggaaacagaaagcuggauaguagaccgacaaugggcacaagaccuaacucugccauggcaaagcggcucaggaggaguguggagagagaugcaccaccugguagaguucgaacccccacacgcagcaacaauaaggguacuggcacuaggcaaccaagaaggcagccuaaaaaccgcacucacaggagccaugcgcgugacgaaggacaccaacgacaacaaccucuacaaacuccacggagggcacguauccugccgcguaaaacuaucagcacuaacgcuaaaaggaacaagcuacaaaauaugcacagacaaaauguucuucgucaaaaaccccacagacacaggccacggcacagucguaaugcaagugaaggucagcaagggggcccccugccgaaucccagucauaguggcagacgaccucacggccgccaucaacaaagggauccugguaacagugaacccaauagcaucgaccaacgacgacgaaguccucauagaagugaaucccccguucggcgacagcuacaucaucguaggacgcggcgacucccgacugacguaccaauggcauaaagaaggcagcagcauugggagcacgcucgggaaagcguucucgaccacgcucaagggcgcgcaaaggcucgcggccuugggcgauaccgcgugggauuucgggagcauaggcggggucuuuaacucgaucgggcgcgcgguccaucaaguguucgggggcgcguucaggaccuuguucgggggcaugagcuggaucacgcaagggcucaugggcgcgcucuugcucuggaugggggucaaugccagggacaggagcauagccuuggccuuucucgcgaccgggggcgugcucguguucuuggccacgaacgugcacgcgugaggacuaguggaagcauuuuccuggcugauuaaaagaaauuacucagcuauggucaucuguuccuguuagaaggcuaugcagcauauuauauacuaugcgcauguuaugaaaugcauaauaaaaaauuuuaaaaaaucuaaaagaucuaaaaaaaaaaaaaaaaaaaaaaaaaaaaaaaaaaaaaaaaaaaaaaaaaaaaaaaaaaaaaaaaugcaucccccccccccccccccccccccccccccccaaaggcucuuuucagagccaccagaauu

SEQ ID NO: 1847 - RNA, 2513 nt, Artificial Sequence
  mRNA product Design d-5 comprising derived and/or modified sequence from YFV__NC_002031.1__X-SS-prME (polyprotein: aa92-778) (opt11)
gggagagggcgcuuggcuugcaaggacccugagcugcggcauugaagcacacccaacccaacucgacugaagucagccucacugaaccggaucugagaaucuucucucucugggcuugccagggcucuccgaaccuagcuagcauccucuucaauuccaacuagaaagcuuaccaugcggggacuaagcagcagaaaaagacgcagccacgaugugcucaccgugcaauuccucauacuggggaugcuccuaaugaccggaggcgugacccuaguaaggaaaaacagauggcuacuacuaaacguaaccucagaagaucuaggaaagacauuuucagucggcacaggcaacugcacaaccaacauacuagaagcaaaauauuggugcccagacagcauggaauacaacugucccaaccucagcccaagagaggaaccagacgacauagacugcugguguuacggaguagaaaacguaagaguggcauacggcaaaugcgacagcgcaggcaggagccgaagaucccgcagagccaucgacuugcccacgcacgaaaaccacggccucaaaacacgacaagaaaaauggaugacagggcgaaugggagaacgacagcuccagaaaauagaacgaugguucguccggaacccguucuucgcaguaacggcacuaacaaucgcauaccucguaggcagcaacaugacacaaagaguggucaucgcgcuacucguacuagcaguggggcccgcauacagugcacacugcauaggaaucacagaccgugacuucaucgaaggcguacacggaggaacguggguaagcgcgacacuggaacaagacaaaugcgugacaguaauggcaccagacaaaccaagccuagacauaucccuagaaacggucgccaucgaccgucccgcagaaguacgaaagguaugcuauaaugcaguccucacacacgucaaaauaaacgacaaaugccccagcacgggcgaagcacaccucgccgaagaaaacgaaggggauaacgcgugcaaacgcaccuacuccgacaggggauggggcaacggaugcggacuguucggaaaaggauccauagucgcaugcgcaaaauuuaccugcgcaaaaagcaugagcuuguucgagguagaccaaacgaagauccaauacguaauccgagcucaacuacacguuggggccaagcaagagaacuggaauacggacaucaaaacacuaaaauucgacgcacucuccggcucacaagaagucgaguucaucggcuacggcaaagcaacacuagaaugccaaguacaaacagcgguggacuucggcaacagcuacauagcagaaauggaaacagaaagcuggauaguagaccgacaaugggcacaagaccuaacucugccauggcaaagcggcucaggaggaguguggagagagaugcaccaccugguagaguucgaacccccacacgcagcaacaauaaggguacuggcacuaggcaaccaagaaggcagccuaaaaaccgcacucacaggagccaugcgcgugacgaaggacaccaacgacaacaaccucuacaaacuccacggagggcacguauccugccgcguaaaacuaucagcacuaacgcuaaaaggaacaagcuacaaaauaugcacagacaaaauguucuucgucaaaaaccccacagacacaggccacggcacagucguaaugcaagugaaggucagcaagggggcccccugccgaaucccagucauaguggcagacgaccucacggccgccaucaacaaagggauccugguaacagugaacccaauagcaucgaccaacgacgacgaaguccucauagaagugaaucccccguucggcgacagcuacaucaucguaggacgcggcgacucccgacugacguaccaauggcauaaagaaggcagcagcauuggaaaacuauucacccaaaccaugaagggcgucgaaagacucgcggugaugggagacaccgcaugggacuucucgagcgcaggcggcuucuucacaagcguaggaaaagggauucacacaguauucggauccgcauuccaaggccucuucgggggacuaaacuggauaacgaaaguaauaaugggagcaguucucauauggguaggaaucaacacacgaaacaugacaauguccaugucaaugauacucguaggcguaaucaugauguuucugucacucggagugggagcaugaggacuaguggaagcauuuuccuggcugauuaaaagaaauuacucagcuauggucaucuguuccuguuagaaggcuaugcagcauauuauauacuaugcgcauguuaugaaaugcauaauaaaaaauuuuaaaaaaucuaaaagaucuaaaaaaaaaaaaaaaaaaaaaaaaaaaaaaaaaaaaaaaaaaaaaaaaaaaaaaaaaaaaaaaaugcaucccccccccccccccccccccccccccccccaaaggcucuuuucagagccaccagaauu

SEQ ID NO: 1848 - RNA, 2516 nt, Artificial Sequence
  mRNA product Design d-5 comprising derived and/or modified sequence from YFV__NC_002031.1__SSjev(V3)-prME-XX (polyprotein: aa122-788) (opt11)
gggagagggcgcuuggcuugcaaggacccugagcugcggcauugaagcacacccaacccaacucgacugaagucagccucacugaaccggaucugagaaucuucucucucugggcuugccagggcucuccgaaccuagcuagcauccucuucaauuccaacuagaaagcuuaccaugaacgagggcucgaucaugugguuggccucgcucgcggucgugaucgcgugcgcgggcgcggugacccuaguaaggaaaaacagauggcuacuacuaaacguaaccucagaagaucuaggaaagacauuuucagucggcacaggcaacugcacaaccaacauacuagaagcaaaauauuggugcccagacagcauggaauacaacugucccaaccucagcccaagagaggaaccagacgacauagacugcugguguuacggaguagaaaacguaagaguggcauacggcaaaugcgacagcgcaggcaggagccgaagaucccgcagagccaucgacuugcccacgcacgaaaaccacggccucaaaacacgacaagaaaaauggaugacagggcgaaugggagaacgacagcuccagaaaauagaacgaugguucguccggaacccguucuucgcaguaacggcacuaacaaucgcauaccucguaggcagcaacaugacacaaagaguggucaucgcgcuacucguacuagcaguggggcccgcauacagugcacacugcauaggaaucacagaccgugacuucaucgaaggcguacacggaggaacguggguaagcgcgacacuggaacaagacaaaugcgugacaguaauggcaccagacaaaccaagccuagacauaucccuagaaacggucgccaucgaccgucccgcagaaguacgaaagguaugcuauaaugcaguccucacacacgucaaaauaaacgacaaaugccccagcacgggcgaagcacaccucgccgaagaaaacgaaggggauaacgcgugcaaacgcaccuacuccgacaggggauggggcaacggaugcggacuguucggaaaaggauccauagucgcaugcgcaaaauuuaccugcgcaaaaagcaugagcuuguucgagguagaccaaacgaagauccaauacguaauccgagcucaacuacacguuggggccaagcaagagaacuggaauacggacaucaaaacacuaaaauucgacgcacucuccggcucacaagaagucgaguucaucggcuacggcaaagcaacacuagaaugccaaguacaaacagcgguggacuucggcaacagcuacauagcagaaauggaaacagaaagcuggauaguagaccgacaaugggcacaagaccuaacucugccauggcaaagcggcucaggaggaguguggagagagaugcaccaccugguagaguucgaacccccacacgcagcaacaauaaggguacuggcacuaggcaaccaagaaggcagccuaaaaaccgcacucacaggagccaugcgcgugacgaaggacaccaacgacaacaaccucuacaaacuccacggagggcacguauccugccgcguaaaacuaucagcacuaacgcuaaaaggaacaagcuacaaaauaugcacagacaaaauguucuucgucaaaaaccccacagacacaggccacggcacagucguaaugcaagugaaggucagcaagggggcccccugccgaaucccagucauaguggcagacgaccucacggccgccaucaacaaagggauccugguaacagugaacccaauagcaucgaccaacgacgacgaaguccucauagaagugaaucccccguucggcgacagcuacaucaucguaggacgcggcgacucccgacugacguaccaauggcauaaagaaggcagcagcauuggaaaacuauucacccaaaccaugaagggcgucgaaagacucgcggugaugggagacaccgcaugggacuucucgagcgcaggcggcuucuucacaagcguaggaaaagggauucacacaguauucggauccgcauuccaaggccucuucgggggacuaaacuggauaacgaaaguaauaaugggagcaguucucauauggguaggaaucaacacacgaaacaugacaauguccaugucaaugauacucguaggcguaaucaugauguuucugucacucggagugggagcagaccaagguugcgccauaaacuucggcaagugaggacuaguggaagcauuuuccuggcugauuaaaagaaauuacucagcuauggucaucuguuccuguuagaaggcuaugcagcauauuauauacuaugcgcauguuaugaaaugcauaauaaaaaauuuuaaaaaaucuaaaagaucuaaaaaaaaaaaaaaaaaaaaaaaaaaaaaaaaaaaaaaaaaaaaaaaaaaaaaaaaaaaaaaaaugcaucccccccccccccccccccccccccccccccaaaggcucuuuucagagccaccagaauu

SEQ ID NO: 1849 - RNA, 2462 nt, Artificial Sequence
  mRNA product Design g-4 comprising derived and/or modified sequence from YFV__NC_002031.1__X-SS-prMEdelstem_TM-JEV (polyprotein: aa92-681) (wt)
gggagacuccugucgggcggaaguaggaggaguagaguuuaaaaacaguacucuuuuuccgguucgggacguaguugaagcaacgacaagccggauaaccgcucuugagacaggaagcuuaccaugagaggauuguccucaaggaaacgccguucccaugauguucugacugugcaauuccuaauuuugggaaugcuguugaugacggguggagugaccuuggugcggaaaaacagaugguugcuccuaaaugugacaucugaggaccucgggaaaacauucucugugggcacaggcaacugcacaacaaacauuuuggaagccaaguacuggugcccagacucaauggaauacaacugucccaaucucaguccaagagaggagccagaugacauugauugcuggugcuaugggguggaaaacguuagagucgcauaugguaagugugacucagcaggcaggucuaggaggucaagaagggccauugacuugccuacgcaugaaaaccaugguuugaagacccggcaagaaaaauggaugacuggaagaaugggugaaaggcaacuccaaaagauugagagaugguucgugaggaaccccuuuuuugcagugacggcucugaccauugccuaccuugugggaagcaacaugacgcaacgagucgugauugcccuacuggucuuggcuguugguccggccuacucagcucacugcauuggaauuacugacagggauuucauugagggggugcauggaggaacuuggguuucagcuacccuggagcaagacaagugugucacuguuauggccccugacaagccuucauuggacaucucacuagagacaguagccauugauagaccugcugaggugaggaaaguguguuacaaugcaguucucacucaugugaagauuaaugacaagugccccagcacuggagaggcccaccuagcugaagagaacgaaggggacaaugcgugcaagcgcacuuauucugauagaggcuggggcaauggcuguggccuauuugggaaagggagcauuguggcaugcgccaaauucacuugugccaaauccaugaguuuguuugagguugaucagaccaaaauucaguaugucaucagagcacaauugcauguaggggccaagcaggaaaauuggaauaccgacauuaagacucucaaguuugaugcccugucaggcucccaggaagucgaguucauuggguauggaaaagcuacacuggaaugccaggugcaaacugcgguggacuuugguaacaguuacaucgcugagauggaaacagagagcuggauaguggacagacagugggcccaggacuugacccugccauggcagaguggaaguggcgggguguggagagagaugcaucaucuugucgaauuugaaccuccgcaugccgccacuaucagaguacuggcccugggaaaccaggaaggcuccuugaaaacagcucuuacuggcgcaaugaggguuacaaaggacacaaaugacaacaaccuuuacaaacuacaugguggacauguuucuugcagagugaaauugucagcuuugacacucaaggggacauccuacaaaauaugcacugacaaaauguuuuuugucaagaacccaacugacacuggccauggcacuguugugaugcaggugaaagugucaaaaggagcccccugcaggauuccagugauaguagcugaugaucuuacagcggcaaucaauaaaggcauuuugguuacaguuaaccccaucgccucaaccaaugaugaugaagugcugauugaggugaacccaccuuuuggagacagcuacauuaucguugggagaggagauucacgucucacuuaccaguggcacaaagagggaagcucaauaggcagcacgcugggcaaggccuuuucaacaacuuugaagggagcucaaagacuggcagcguugggcgacacagccugggacuuuggcucuauuggaggggucuucaacuccauaggaagagccguucaccaaguguuugguggugccuucagaacacucuuugggggaaugucuuggaucacacaagggcuaaugggugcccuacugcucuggaugggcgucaacgcacgagaccgaucaauugcuuuggccuucuuagccacaggaggugugcucguguucuuagcgaccaaugugcacgccuaaggacuaguaauaaggaaacuguaugaaugucugugggcaggaagugaagagauccuucuguaaagguuuuuggaauuaugucugcugaauaauaaacuuuuuugaaauaauaaaucugguagaaaaaugagaucuaaaaaaaaaaaaaaaaaaaaaaaaaaaaaaaaaaaaaaaaaaaaaaaaaaaaaaaaaaaaaaaaugcaucccccccccccccccccccccccccccccccaaaggcucuuuucagagccaccagaauu

SEQ ID NO: 1850 - RNA, 2435 nt, Artificial Sequence
  mRNA product Design g-4 comprising derived and/or modified sequence from YFV__NC_002031.1__SSjev(V3)-prMEdelstem_TM-JEV (polyprotein: aa122-681) (wt)
gggagacuccugucgggcggaaguaggaggaguagaguuuaaaaacaguacucuuuuuccgguucgggacguaguugaagcaacgacaagccggauaaccgcucuugagacaggaagcuuaccaugaaugaaggcucaaucauguggcucgcgagcuuggcaguugucauagcuugugcaggagccgugaccuuggugcggaaaaacagaugguugcuccuaaaugugacaucugaggaccucgggaaaacauucucugugggcacaggcaacugcacaacaaacauuuuggaagccaaguacuggugcccagacucaauggaauacaacugucccaaucucaguccaagagaggagccagaugacauugauugcuggugcuaugggguggaaaacguuagagucgcauaugguaagugugacucagcaggcaggucuaggaggucaagaagggccauugacuugccuacgcaugaaaaccaugguuugaagacccggcaagaaaaauggaugacuggaagaaugggugaaaggcaacuccaaaagauugagagaugguucgugaggaaccccuuuuuugcagugacggcucugaccauugccuaccuugugggaagcaacaugacgcaacgagucgugauugcccuacuggucuuggcuguugguccggccuacucagcucacugcauuggaauuacugacagggauuucauugagggggugcauggaggaacuuggguuucagcuacccuggagcaagacaagugugucacuguuauggccccugacaagccuucauuggacaucucacuagagacaguagccauugauagaccugcugaggugaggaaaguguguuacaaugcaguucucacucaugugaagauuaaugacaagugccccagcacuggagaggcccaccuagcugaagagaacgaaggggacaaugcgugcaagcgcacuuauucugauagaggcuggggcaauggcuguggccuauuugggaaagggagcauuguggcaugcgccaaauucacuugugccaaauccaugaguuuguuugagguugaucagaccaaaauucaguaugucaucagagcacaauugcauguaggggccaagcaggaaaauuggaauaccgacauuaagacucucaaguuugaugcccugucaggcucccaggaagucgaguucauuggguauggaaaagcuacacuggaaugccaggugcaaacugcgguggacuuugguaacaguuacaucgcugagauggaaacagagagcuggauaguggacagacagugggcccaggacuugacccugccauggcagaguggaaguggcgggguguggagagagaugcaucaucuugucgaauuugaaccuccgcaugccgccacuaucagaguacuggcccugggaaaccaggaaggcuccuugaaaacagcucuuacuggcgcaaugaggguuacaaaggacacaaaugacaacaaccuuuacaaacuacaugguggacauguuucuugcagagugaaauugucagcuuugacacucaaggggacauccuacaaaauaugcacugacaaaauguuuuuugucaagaacccaacugacacuggccauggcacuguugugaugcaggugaaagugucaaaaggagcccccugcaggauuccagugauaguagcugaugaucuuacagcggcaaucaauaaaggcauuuugguuacaguuaaccccaucgccucaaccaaugaugaugaagugcugauugaggugaacccaccuuuuggagacagcuacauuaucguugggagaggagauucacgucucacuuaccaguggcacaaagagggaagcucaauaggcagcacgcugggcaaggccuuuucaacaacuuugaagggagcucaaagacuggcagcguugggcgacacagccugggacuuuggcucuauuggaggggucuucaacuccauaggaagagccguucaccaaguguuugguggugccuucagaacacucuuugggggaaugucuuggaucacacaagggcuaaugggugcccuacugcucuggaugggcgucaacgcacgagaccgaucaauugcuuuggccuucuuagccacaggaggugugcucguguucuuagcgaccaaugugcacgccuaaggacuaguaauaaggaaacuguaugaaugucugugggcaggaagugaagagauccuucuguaaagguuuuuggaauuaugucugcugaauaauaaacuuuuuugaaauaauaaaucugguagaaaaaugagaucuaaaaaaaaaaaaaaaaaaaaaaaaaaaaaaaaaaaaaaaaaaaaaaaaaaaaaaaaaaaaaaaaugcaucccccccccccccccccccccccccccccccaaaggcucuuuucagagccaccagaauu

SEQ ID NO: 1851 - RNA, 2450 nt, Artificial Sequence
  mRNA product Design g-4 comprising derived and/or modified sequence from YFV__NC_002031.1__X-SS-prME (polyprotein: aa92-778) (wt)
gggagacuccugucgggcggaaguaggaggaguagaguuuaaaaacaguacucuuuuuccgguucgggacguaguugaagcaacgacaagccggauaaccgcucuugagacaggaagcuuaccaugagaggauuguccucaaggaaacgccguucccaugauguucugacugugcaauuccuaauuuugggaaugcuguugaugacggguggagugaccuuggugcggaaaaacagaugguugcuccuaaaugugacaucugaggaccucgggaaaacauucucugugggcacaggcaacugcacaacaaacauuuuggaagccaaguacuggugcccagacucaauggaauacaacugucccaaucucaguccaagagaggagccagaugacauugauugcuggugcuaugggguggaaaacguuagagucgcauaugguaagugugacucagcaggcaggucuaggaggucaagaagggccauugacuugccuacgcaugaaaaccaugguuugaagacccggcaagaaaaauggaugacuggaagaaugggugaaaggcaacuccaaaagauugagagaugguucgugaggaaccccuuuuuugcagugacggcucugaccauugccuaccuugugggaagcaacaugacgcaacgagucgugauugcccuacuggucuuggcuguugguccggccuacucagcucacugcauuggaauuacugacagggauuucauugagggggugcauggaggaacuuggguuucagcuacccuggagcaagacaagugugucacuguuauggccccugacaagccuucauuggacaucucacuagagacaguagccauugauagaccugcugaggugaggaaaguguguuacaaugcaguucucacucaugugaagauuaaugacaagugccccagcacuggagaggcccaccuagcugaagagaacgaaggggacaaugcgugcaagcgcacuuauucugauagaggcuggggcaauggcuguggccuauuugggaaagggagcauuguggcaugcgccaaauucacuugugccaaauccaugaguuuguuugagguugaucagaccaaaauucaguaugucaucagagcacaauugcauguaggggccaagcaggaaaauuggaauaccgacauuaagacucucaaguuugaugcccugucaggcucccaggaagucgaguucauuggguauggaaaagcuacacuggaaugccaggugcaaacugcgguggacuuugguaacaguuacaucgcugagauggaaacagagagcuggauaguggacagacagugggcccaggacuugacccugccauggcagaguggaaguggcgggguguggagagagaugcaucaucuugucgaauuugaaccuccgcaugccgccacuaucagaguacuggcccugggaaaccaggaaggcuccuugaaaacagcucuuacuggcgcaaugaggguuacaaaggacacaaaugacaacaaccuuuacaaacuacaugguggacauguuucuugcagagugaaauugucagcuuugacacucaaggggacauccuacaaaauaugcacugacaaaauguuuuuugucaagaacccaacugacacuggccauggcacuguugugaugcaggugaaagugucaaaaggagcccccugcaggauuccagugauaguagcugaugaucuuacagcggcaaucaauaaaggcauuuugguuacaguuaaccccaucgccucaaccaaugaugaugaagugcugauugaggugaacccaccuuuuggagacagcuacauuaucguugggagaggagauucacgucucacuuaccaguggcacaaagagggaagcucaauaggaaaguuguucacucagaccaugaaaggcguggaacgccuggccgucaugggagacaccgccugggauuucagcuccgcuggaggguucuucacuucgguugggaaaggaauccauacgguguuuggcucugccuuucaggggcuauuuggcggcuugaacuggauaacaaaggucaucaugggggcgguacuuauauggguuggcaucaacacaagaaacaugacaauguccaugagcaugaucuugguaggagugaucaugauguuuuugucucuaggaguuggggcguaaggacuaguaauaaggaaacuguaugaaugucugugggcaggaagugaagagauccuucuguaaagguuuuuggaauuaugucugcugaauaauaaacuuuuuugaaauaauaaaucugguagaaaaaugagaucuaaaaaaaaaaaaaaaaaaaaaaaaaaaaaaaaaaaaaaaaaaaaaaaaaaaaaaaaaaaaaaaaugcaucccccccccccccccccccccccccccccccaaaggcucuuuucagagccaccagaauu

SEQ ID NO: 1852 - RNA, 2453 nt, Artificial Sequence
  mRNA product Design g-4 comprising derived and/or modified sequence from YFV__NC_002031.1__SSjev(V3)-prME-XX (polyprotein: aa122-788) (wt)
gggagacuccugucgggcggaaguaggaggaguagaguuuaaaaacaguacucuuuuuccgguucgggacguaguugaagcaacgacaagccggauaaccgcucuugagacaggaagcuuaccaugaaugaaggcucaaucauguggcucgcgagcuuggcaguugucauagcuugugcaggagccgugaccuuggugcggaaaaacagaugguugcuccuaaaugugacaucugaggaccucgggaaaacauucucugugggcacaggcaacugcacaacaaacauuuuggaagccaaguacuggugcccagacucaauggaauacaacugucccaaucucaguccaagagaggagccagaugacauugauugcuggugcuaugggguggaaaacguuagagucgcauaugguaagugugacucagcaggcaggucuaggaggucaagaagggccauugacuugccuacgcaugaaaaccaugguuugaagacccggcaagaaaaauggaugacuggaagaaugggugaaaggcaacuccaaaagauugagagaugguucgugaggaaccccuuuuuugcagugacggcucugaccauugccuaccuugugggaagcaacaugacgcaacgagucgugauugcccuacuggucuuggcuguugguccggccuacucagcucacugcauuggaauuacugacagggauuucauugagggggugcauggaggaacuuggguuucagcuacccuggagcaagacaagugugucacuguuauggccccugacaagccuucauuggacaucucacuagagacaguagccauugauagaccugcugaggugaggaaaguguguuacaaugcaguucucacucaugugaagauuaaugacaagugccccagcacuggagaggcccaccuagcugaagagaacgaaggggacaaugcgugcaagcgcacuuauucugauagaggcuggggcaauggcuguggccuauuugggaaagggagcauuguggcaugcgccaaauucacuugugccaaauccaugaguuuguuugagguugaucagaccaaaauucaguaugucaucagagcacaauugcauguaggggccaagcaggaaaauuggaauaccgacauuaagacucucaaguuugaugcccugucaggcucccaggaagucgaguucauuggguauggaaaagcuacacuggaaugccaggugcaaacugcgguggacuuugguaacaguuacaucgcugagauggaaacagagagcuggauaguggacagacagugggcccaggacuugacccugccauggcagaguggaaguggcgggguguggagagagaugcaucaucuugucgaauuugaaccuccgcaugccgccacuaucagaguacuggcccugggaaaccaggaaggcuccuugaaaacagcucuuacuggcgcaaugaggguuacaaaggacacaaaugacaacaaccuuuacaaacuacaugguggacauguuucuugcagagugaaauugucagcuuugacacucaaggggacauccuacaaaauaugcacugacaaaauguuuuuugucaagaacccaacugacacuggccauggcacuguugugaugcaggugaaagugucaaaaggagcccccugcaggauuccagugauaguagcugaugaucuuacagcggcaaucaauaaaggcauuuugguuacaguuaaccccaucgccucaaccaaugaugaugaagugcugauugaggugaacccaccuuuuggagacagcuacauuaucguugggagaggagauucacgucucacuuaccaguggcacaaagagggaagcucaauaggaaaguuguucacucagaccaugaaaggcguggaacgccuggccgucaugggagacaccgccugggauuucagcuccgcuggaggguucuucacuucgguugggaaaggaauccauacgguguuuggcucugccuuucaggggcuauuuggcggcuugaacuggauaacaaaggucaucaugggggcgguacuuauauggguuggcaucaacacaagaaacaugacaauguccaugagcaugaucuugguaggagugaucaugauguuuuugucucuaggaguuggggcggaucaaggaugcgccaucaacuuuggcaaguaaggacuaguaauaaggaaacuguaugaaugucugugggcaggaagugaagagauccuucuguaaagguuuuuggaauuaugucugcugaauaauaaacuuuuuugaaauaauaaaucugguagaaaaaugagaucuaaaaaaaaaaaaaaaaaaaaaaaaaaaaaaaaaaaaaaaaaaaaaaaaaaaaaaaaaaaaaaaaugcaucccccccccccccccccccccccccccccccaaaggcucuuuucagagccaccagaauu

SEQ ID NO: 1853 - RNA, 2462 nt, Artificial Sequence
  mRNA product Design g-4 comprising derived and/or modified sequence from YFV__NC_002031.1__X-SS-prMEdelstem_TM-JEV (polyprotein: aa92-681) (opt1)
gggagacuccugucgggcggaaguaggaggaguagaguuuaaaaacaguacucuuuuuccgguucgggacguaguugaagcaacgacaagccggauaaccgcucuugagacaggaagcuuaccaugcggggccugagcucccgcaagcggcgcagccacgacgugcucaccguccaguuccugauccuggggaugcuccugaugaccggcggggugacgcuggugcggaagaaccgcuggcuccugcugaacgucaccuccgaggaccucggcaagaccuucagcguggggaccggcaacugcacgaccaacauccuggaggccaaguacuggugccccgacuccauggaguacaacugcccgaaccugagcccccgggaggagcccgacgacaucgacugcuggugcuacggcguggagaacguccgcguggccuacgggaagugcgacuccgcgggccggagccgccggucccgccgggccaucgaccuccccacccacgagaaccacgggcugaagacccgccaggagaaguggaugacgggccggaugggggagcgccagcugcagaagaucgagcggugguucgugcgcaacccguucuucgccgucaccgcccucaccaucgccuaccuggugggcagcaacaugacccagcggguggucaucgcgcugcucgugcuggccgugggccccgccuacuccgcccacugcaucgggaucacggaccgcgacuucaucgagggcguccacgggggcaccugggugagcgcgacccuggagcaggacaagugcgugaccgucauggcccccgacaagcccucccucgacaucagccuggagacgguggccaucgaccggccggccgaggugcgcaaggucugcuacaacgccgugcugacccacgugaagaucaacgacaagugccccuccaccggcgaggcgcaccucgccgaggagaacgagggggacaacgccugcaagcggaccuacagcgaccggggcugggggaacggcugcgggcuguucggcaagggcuccaucgucgccugcgccaaguucacgugcgcgaagagcaugucccuguucgagguggaccagaccaagauccaguacgucauccgcgcccagcuccacgugggggccaagcaggagaacuggaacaccgacaucaagacccugaaguucgacgcccugagcggcagccaggagguggaguucaucggguacggcaaggccacgcucgagugccagguccagaccgcgguggacuucgggaacuccuacaucgccgagauggagaccgagagcuggaucguggaccggcagugggcccaggaccugacccugcccuggcaguccggcagcggcggggucuggcgcgagaugcaccaccucguggaguucgagcccccgcacgccgccacgauccgggugcuggcgcugggcaaccaggaggggucccucaagaccgcccugaccggcgccaugcgcgucaccaaggacacgaacgacaacaaccuguacaagcuccacgggggccacgugagcugccgggugaagcuguccgcccugacccucaagggcaccagcuacaagaucugcaccgacaagauguucuucgucaagaaccccacggacaccgggcacggcaccguggugaugcaggucaagguguccaagggggcgcccugccgcaucccggugaucgucgccgacgaccugaccgccgccaucaacaagggcauccuggugaccgugaacccgaucgccagcacgaacgacgacgagguccucaucgaggugaacccccccuucggcgacuccuacaucaucguggggcggggcgacagccgccugaccuaccaguggcacaaggagggguccagcaucggcagcacccuggggaaggccuucuccaccacgcucaagggcgcccagcgccuggcggcccugggggacaccgccugggacuucggcagcaucgggggcguguucaacuccaucggccgggccguccaccagguguucgggggcgccuuccgcacccucuucgggggcaugagcuggaucacccaggggcugaugggcgcgcugcuccuguggaugggggugaacgcccgggaccgcuccaucgcccuggccuuccucgcgacgggcggcguccugguguuccuggccaccaacgugcacgccugaggacuaguaauaaggaaacuguaugaaugucugugggcaggaagugaagagauccuucuguaaagguuuuuggaauuaugucugcugaauaauaaacuuuuuugaaauaauaaaucugguagaaaaaugagaucuaaaaaaaaaaaaaaaaaaaaaaaaaaaaaaaaaaaaaaaaaaaaaaaaaaaaaaaaaaaaaaaaugcaucccccccccccccccccccccccccccccccaaaggcucuuuucagagccaccagaauu

SEQ ID NO: 1854 - RNA, 2435 nt, Artificial Sequence
  mRNA product Design g-4 comprising derived and/or modified sequence from YFV__NC_002031.1__SSjev(V3)-prMEdelstem_TM-JEV (polyprotein: aa122-681) (opt1)
gggagacuccugucgggcggaaguaggaggaguagaguuuaaaaacaguacucuuuuuccgguucgggacguaguugaagcaacgacaagccggauaaccgcucuugagacaggaagcuuaccaugaacgagggcagcaucauguggcuggccucccucgccguggucaucgcgugcgccggggccgugacgcuggugcggaagaaccgcuggcuccugcugaacgucaccuccgaggaccucggcaagaccuucagcguggggaccggcaacugcacgaccaacauccuggaggccaaguacuggugccccgacuccauggaguacaacugcccgaaccugagcccccgggaggagcccgacgacaucgacugcuggugcuacggcguggagaacguccgcguggccuacgggaagugcgacuccgcgggccggagccgccggucccgccgggccaucgaccuccccacccacgagaaccacgggcugaagacccgccaggagaaguggaugacgggccggaugggggagcgccagcugcagaagaucgagcggugguucgugcgcaacccguucuucgccgucaccgcccucaccaucgccuaccuggugggcagcaacaugacccagcggguggucaucgcgcugcucgugcuggccgugggccccgccuacuccgcccacugcaucgggaucacggaccgcgacuucaucgagggcguccacgggggcaccugggugagcgcgacccuggagcaggacaagugcgugaccgucauggcccccgacaagcccucccucgacaucagccuggagacgguggccaucgaccggccggccgaggugcgcaaggucugcuacaacgccgugcugacccacgugaagaucaacgacaagugccccuccaccggcgaggcgcaccucgccgaggagaacgagggggacaacgccugcaagcggaccuacagcgaccggggcugggggaacggcugcgggcuguucggcaagggcuccaucgucgccugcgccaaguucacgugcgcgaagagcaugucccuguucgagguggaccagaccaagauccaguacgucauccgcgcccagcuccacgugggggccaagcaggagaacuggaacaccgacaucaagacccugaaguucgacgcccugagcggcagccaggagguggaguucaucggguacggcaaggccacgcucgagugccagguccagaccgcgguggacuucgggaacuccuacaucgccgagauggagaccgagagcuggaucguggaccggcagugggcccaggaccugacccugcccuggcaguccggcagcggcggggucuggcgcgagaugcaccaccucguggaguucgagcccccgcacgccgccacgauccgggugcuggcgcugggcaaccaggaggggucccucaagaccgcccugaccggcgccaugcgcgucaccaaggacacgaacgacaacaaccuguacaagcuccacgggggccacgugagcugccgggugaagcuguccgcccugacccucaagggcaccagcuacaagaucugcaccgacaagauguucuucgucaagaaccccacggacaccgggcacggcaccguggugaugcaggucaagguguccaagggggcgcccugccgcaucccggugaucgucgccgacgaccugaccgccgccaucaacaagggcauccuggugaccgugaacccgaucgccagcacgaacgacgacgagguccucaucgaggugaacccccccuucggcgacuccuacaucaucguggggcggggcgacagccgccugaccuaccaguggcacaaggagggguccagcaucggcagcacccuggggaaggccuucuccaccacgcucaagggcgcccagcgccuggcggcccugggggacaccgccugggacuucggcagcaucgggggcguguucaacuccaucggccgggccguccaccagguguucgggggcgccuuccgcacccucuucgggggcaugagcuggaucacccaggggcugaugggcgcgcugcuccuguggaugggggugaacgcccgggaccgcuccaucgcccuggccuuccucgcgacgggcggcguccugguguuccuggccaccaacgugcacgccugaggacuaguaauaaggaaacuguaugaaugucugugggcaggaagugaagagauccuucuguaaagguuuuuggaauuaugucugcugaauaauaaacuuuuuugaaauaauaaaucugguagaaaaaugagaucuaaaaaaaaaaaaaaaaaaaaaaaaaaaaaaaaaaaaaaaaaaaaaaaaaaaaaaaaaaaaaaaaugcaucccccccccccccccccccccccccccccccaaaggcucuuuucagagccaccagaauu

SEQ ID NO: 1855 - RNA, 2450 nt, Artificial Sequence
  mRNA product Design g-4 comprising derived and/or modified sequence from YFV__NC_002031.1__X-SS-prME (polyprotein: aa92-778) (opt1)
gggagacuccugucgggcggaaguaggaggaguagaguuuaaaaacaguacucuuuuuccgguucgggacguaguugaagcaacgacaagccggauaaccgcucuugagacaggaagcuuaccaugcggggccugagcucccgcaagcggcgcagccacgacgugcucaccguccaguuccugauccuggggaugcuccugaugaccggcggggugacgcuggugcggaagaaccgcuggcuccugcugaacgucaccuccgaggaccucggcaagaccuucagcguggggaccggcaacugcacgaccaacauccuggaggccaaguacuggugccccgacuccauggaguacaacugcccgaaccugagcccccgggaggagcccgacgacaucgacugcuggugcuacggcguggagaacguccgcguggccuacgggaagugcgacuccgcgggccggagccgccggucccgccgggccaucgaccuccccacccacgagaaccacgggcugaagacccgccaggagaaguggaugacgggccggaugggggagcgccagcugcagaagaucgagcggugguucgugcgcaacccguucuucgccgucaccgcccucaccaucgccuaccuggugggcagcaacaugacccagcggguggucaucgcgcugcucgugcuggccgugggccccgccuacuccgcccacugcaucgggaucacggaccgcgacuucaucgagggcguccacgggggcaccugggugagcgcgacccuggagcaggacaagugcgugaccgucauggcccccgacaagcccucccucgacaucagccuggagacgguggccaucgaccggccggccgaggugcgcaaggucugcuacaacgccgugcugacccacgugaagaucaacgacaagugccccuccaccggcgaggcgcaccucgccgaggagaacgagggggacaacgccugcaagcggaccuacagcgaccggggcugggggaacggcugcgggcuguucggcaagggcuccaucgucgccugcgccaaguucacgugcgcgaagagcaugucccuguucgagguggaccagaccaagauccaguacgucauccgcgcccagcuccacgugggggccaagcaggagaacuggaacaccgacaucaagacccugaaguucgacgcccugagcggcagccaggagguggaguucaucggguacggcaaggccacgcucgagugccagguccagaccgcgguggacuucgggaacuccuacaucgccgagauggagaccgagagcuggaucguggaccggcagugggcccaggaccugacccugcccuggcaguccggcagcggcggggucuggcgcgagaugcaccaccucguggaguucgagcccccgcacgccgccacgauccgggugcuggcgcugggcaaccaggaggggucccucaagaccgcccugaccggcgccaugcgcgucaccaaggacacgaacgacaacaaccuguacaagcuccacgggggccacgugagcugccgggugaagcuguccgcccugacccucaagggcaccagcuacaagaucugcaccgacaagauguucuucgucaagaaccccacggacaccgggcacggcaccguggugaugcaggucaagguguccaagggggcgcccugccgcaucccggugaucgucgccgacgaccugaccgccgccaucaacaagggcauccuggugaccgugaacccgaucgccagcacgaacgacgacgagguccucaucgaggugaacccccccuucggcgacuccuacaucaucguggggcggggcgacagccgccugaccuaccaguggcacaaggagggguccagcaucggcaagcuguucacccagaccaugaagggggucgagcggcuggcggugaugggcgacacggccugggacuucuccagcgccggcggguucuucaccuccgugggcaaggggauccacaccgucuucggcagcgccuuccaggggcucuucggcggccugaacuggaucaccaaggugaucaugggggccgugcugaucugggucggcaucaacacgcgcaacaugaccauguccaugagcaugauccucgugggggugaucaugauguuccugagccugggcgucggggcgugaggacuaguaauaaggaaacuguaugaaugucugugggcaggaagugaagagauccuucuguaaagguuuuuggaauuaugucugcugaauaauaaacuuuuuugaaauaauaaaucugguagaaaaaugagaucuaaaaaaaaaaaaaaaaaaaaaaaaaaaaaaaaaaaaaaaaaaaaaaaaaaaaaaaaaaaaaaaaugcaucccccccccccccccccccccccccccccccaaaggcucuuuucagagccaccagaauu

SEQ ID NO: 1856 - RNA, 2453 nt, Artificial Sequence
  mRNA product Design g-4 comprising derived and/or modified sequence from YFV__NC_002031.1__SSjev(V3)-prME-XX (polyprotein: aa122-788) (opt1)
gggagacuccugucgggcggaaguaggaggaguagaguuuaaaaacaguacucuuuuuccgguucgggacguaguugaagcaacgacaagccggauaaccgcucuugagacaggaagcuuaccaugaacgagggcagcaucauguggcuggccucccucgccguggucaucgcgugcgccggggccgugacgcuggugcggaagaaccgcuggcuccugcugaacgucaccuccgaggaccucggcaagaccuucagcguggggaccggcaacugcacgaccaacauccuggaggccaaguacuggugccccgacuccauggaguacaacugcccgaaccugagcccccgggaggagcccgacgacaucgacugcuggugcuacggcguggagaacguccgcguggccuacgggaagugcgacuccgcgggccggagccgccggucccgccgggccaucgaccuccccacccacgagaaccacgggcugaagacccgccaggagaaguggaugacgggccggaugggggagcgccagcugcagaagaucgagcggugguucgugcgcaacccguucuucgccgucaccgcccucaccaucgccuaccuggugggcagcaacaugacccagcggguggucaucgcgcugcucgugcuggccgugggccccgccuacuccgcccacugcaucgggaucacggaccgcgacuucaucgagggcguccacgggggcaccugggugagcgcgacccuggagcaggacaagugcgugaccgucauggcccccgacaagcccucccucgacaucagccuggagacgguggccaucgaccggccggccgaggugcgcaaggucugcuacaacgccgugcugacccacgugaagaucaacgacaagugccccuccaccggcgaggcgcaccucgccgaggagaacgagggggacaacgccugcaagcggaccuacagcgaccggggcugggggaacggcugcgggcuguucggcaagggcuccaucgucgccugcgccaaguucacgugcgcgaagagcaugucccuguucgagguggaccagaccaagauccaguacgucauccgcgcccagcuccacgugggggccaagcaggagaacuggaacaccgacaucaagacccugaaguucgacgcccugagcggcagccaggagguggaguucaucggguacggcaaggccacgcucgagugccagguccagaccgcgguggacuucgggaacuccuacaucgccgagauggagaccgagagcuggaucguggaccggcagugggcccaggaccugacccugcccuggcaguccggcagcggcggggucuggcgcgagaugcaccaccucguggaguucgagcccccgcacgccgccacgauccgggugcuggcgcugggcaaccaggaggggucccucaagaccgcccugaccggcgccaugcgcgucaccaaggacacgaacgacaacaaccuguacaagcuccacgggggccacgugagcugccgggugaagcuguccgcccugacccucaagggcaccagcuacaagaucugcaccgacaagauguucuucgucaagaaccccacggacaccgggcacggcaccguggugaugcaggucaagguguccaagggggcgcccugccgcaucccggugaucgucgccgacgaccugaccgccgccaucaacaagggcauccuggugaccgugaacccgaucgccagcacgaacgacgacgagguccucaucgaggugaacccccccuucggcgacuccuacaucaucguggggcggggcgacagccgccugaccuaccaguggcacaaggagggguccagcaucggcaagcuguucacccagaccaugaagggggucgagcggcuggcggugaugggcgacacggccugggacuucuccagcgccggcggguucuucaccuccgugggcaaggggauccacaccgucuucggcagcgccuuccaggggcucuucggcggccugaacuggaucaccaaggugaucaugggggccgugcugaucugggucggcaucaacacgcgcaacaugaccauguccaugagcaugauccucgugggggugaucaugauguuccugagccugggcgucggggcggaccagggcugcgccaucaacuucggcaagugaggacuaguaauaaggaaacuguaugaaugucugugggcaggaagugaagagauccuucuguaaagguuuuuggaauuaugucugcugaauaauaaacuuuuuugaaauaauaaaucugguagaaaaaugagaucuaaaaaaaaaaaaaaaaaaaaaaaaaaaaaaaaaaaaaaaaaaaaaaaaaaaaaaaaaaaaaaaaugcaucccccccccccccccccccccccccccccccaaaggcucuuuucagagccaccagaauu

SEQ ID NO: 1857 - RNA, 2462 nt, Artificial Sequence
  mRNA product Design g-4 comprising derived and/or modified sequence from YFV__NC_002031.1__X-SS-prMEdelstem_TM-JEV (polyprotein: aa92-681) (opt1)
gggagacuccugucgggcggaaguaggaggaguagaguuuaaaaacaguacucuuuuuccgguucgggacguaguugaagcaacgacaagccggauaaccgcucuugagacaggaagcuuaccaugcggggccugagcucccgcaagcggcgcagccacgacgugcucaccguccaguuccugauccuggggaugcuccugaugaccggcggggugacgcuggugcggaagaaccgcuggcuccugcugaacgucaccuccgaggaccucggcaagaccuucagcguggggaccggcaacugcacgaccaacauccuggaggccaaguacuggugccccgacuccauggaguacaacugcccgaaccugagcccccgggaggagcccgacgacaucgacugcuggugcuacggcguggagaacguccgcguggccuacgggaagugcgacuccgcgggccggagccgccggucccgccgggccaucgaccuccccacccacgagaaccacgggcugaagacccgccaggagaaguggaugacgggccggaugggggagcgccagcugcagaagaucgagcggugguucgugcgcaacccguucuucgccgucaccgcccucaccaucgccuaccuggugggcagcaacaugacccagcggguggucaucgcgcugcucgugcuggccgugggccccgccuacuccgcccacugcaucgggaucacggaccgcgacuucaucgagggcguccacgggggcaccugggugagcgcgacccuggagcaggacaagugcgugaccgucauggcccccgacaagcccucccucgacaucagccuggagacgguggccaucgaccggccggccgaggugcgcaaggucugcuacaacgccgugcugacccacgugaagaucaacgacaagugccccuccaccggcgaggcgcaccucgccgaggagaacgagggggacaacgccugcaagcggaccuacagcgaccggggcugggggaacggcugcgggcuguucggcaagggcuccaucgucgccugcgccaaguucacgugcgcgaaguccaugagccuguucgagguggaccagaccaagauccaguacgucauccgcgcccagcuccacgugggggccaagcaggagaacuggaacaccgacaucaagacccugaaguucgacgcccugagcggcagccaggagguggaguucaucggguacggcaaggccacgcucgagugccagguccagaccgcgguggacuucgggaacuccuacaucgccgagauggagaccgagagcuggaucguggaccggcagugggcccaggaccugacccugcccuggcaguccggcagcggcggggucuggcgcgagaugcaccaccucguggaguucgagcccccgcacgccgccacgauccgggugcuggcgcugggcaaccaggaggggucccucaagaccgcccugaccggcgccaugcgcgucaccaaggacacgaacgacaacaaccuguacaagcuccacgggggccacgugagcugccgggugaagcuguccgcccugacccucaagggcaccagcuacaagaucugcaccgacaagauguucuucgucaagaaccccacggacaccgggcacggcaccguggugaugcaggucaagguguccaagggggcgcccugccgcaucccggugaucgucgccgacgaccugaccgccgccaucaacaagggcauccuggugaccgugaacccgaucgccagcacgaacgacgacgagguccucaucgaggugaacccccccuucggcgacuccuacaucaucguggggcggggcgacagccgccugaccuaccaguggcacaaggagggguccagcaucggcagcacccuggggaaggccuucuccaccacgcucaagggcgcccagcgccuggcggcccugggggacaccgccugggacuucggcagcaucgggggcguguucaacuccaucggccgggccguccaccagguguucgggggcgccuuccgcacccucuucgggggcaugagcuggaucacccaggggcugaugggcgcgcugcuccuguggaugggggugaacgcccgggaccgcuccaucgcccuggccuuccucgcgacgggcggcguccugguguuccuggccaccaacgugcacgccugaggacuaguaauaaggaaacuguaugaaugucugugggcaggaagugaagagauccuucuguaaagguuuuuggaauuaugucugcugaauaauaaacuuuuuugaaauaauaaaucugguagaaaaaugagaucuaaaaaaaaaaaaaaaaaaaaaaaaaaaaaaaaaaaaaaaaaaaaaaaaaaaaaaaaaaaaaaaaugcaucccccccccccccccccccccccccccccccaaaggcucuuuucagagccaccagaauu

SEQ ID NO: 1858 - RNA, 2435 nt, Artificial Sequence
  mRNA product Design g-4 comprising derived and/or modified sequence from YFV__NC_002031.1__SSjev(V3)-prMEdelstem_TM-JEV (polyprotein: aa122-681) (opt1)
gggagacuccugucgggcggaaguaggaggaguagaguuuaaaaacaguacucuuuuuccgguucgggacguaguugaagcaacgacaagccggauaaccgcucuugagacaggaagcuuaccaugaacgagggcagcaucauguggcuggccucccucgccguggucaucgcgugcgccggggccgugacgcuggugcggaagaaccgcuggcuccugcugaacgucaccuccgaggaccucggcaagaccuucagcguggggaccggcaacugcacgaccaacauccuggaggccaaguacuggugccccgacuccauggaguacaacugcccgaaccugagcccccgggaggagcccgacgacaucgacugcuggugcuacggcguggagaacguccgcguggccuacgggaagugcgacuccgcgggccggagccgccggucccgccgggccaucgaccuccccacccacgagaaccacgggcugaagacccgccaggagaaguggaugacgggccggaugggggagcgccagcugcagaagaucgagcggugguucgugcgcaacccguucuucgccgucaccgcccucaccaucgccuaccuggugggcagcaacaugacccagcggguggucaucgcgcugcucgugcuggccgugggccccgccuacuccgcccacugcaucgggaucacggaccgcgacuucaucgagggcguccacgggggcaccugggugagcgcgacccuggagcaggacaagugcgugaccgucauggcccccgacaagcccucccucgacaucagccuggagacgguggccaucgaccggccggccgaggugcgcaaggucugcuacaacgccgugcugacccacgugaagaucaacgacaagugccccuccaccggcgaggcgcaccucgccgaggagaacgagggggacaacgccugcaagcggaccuacagcgaccggggcugggggaacggcugcgggcuguucggcaagggcuccaucgucgccugcgccaaguucacgugcgcgaaguccaugagccuguucgagguggaccagaccaagauccaguacgucauccgcgcccagcuccacgugggggccaagcaggagaacuggaacaccgacaucaagacccugaaguucgacgcccugagcggcagccaggagguggaguucaucggguacggcaaggccacgcucgagugccagguccagaccgcgguggacuucgggaacuccuacaucgccgagauggagaccgagagcuggaucguggaccggcagugggcccaggaccugacccugcccuggcaguccggcagcggcggggucuggcgcgagaugcaccaccucguggaguucgagcccccgcacgccgccacgauccgggugcuggcgcugggcaaccaggaggggucccucaagaccgcccugaccggcgccaugcgcgucaccaaggacacgaacgacaacaaccuguacaagcuccacgggggccacgugagcugccgggugaagcuguccgcccugacccucaagggcaccagcuacaagaucugcaccgacaagauguucuucgucaagaaccccacggacaccgggcacggcaccguggugaugcaggucaagguguccaagggggcgcccugccgcaucccggugaucgucgccgacgaccugaccgccgccaucaacaagggcauccuggugaccgugaacccgaucgccagcacgaacgacgacgagguccucaucgaggugaacccccccuucggcgacuccuacaucaucguggggcggggcgacagccgccugaccuaccaguggcacaaggagggguccagcaucggcagcacccuggggaaggccuucuccaccacgcucaagggcgcccagcgccuggcggcccugggggacaccgccugggacuucggcagcaucgggggcguguucaacuccaucggccgggccguccaccagguguucgggggcgccuuccgcacccucuucgggggcaugagcuggaucacccaggggcugaugggcgcgcugcuccuguggaugggggugaacgcccgggaccgcuccaucgcccuggccuuccucgcgacgggcggcguccugguguuccuggccaccaacgugcacgccugaggacuaguaauaaggaaacuguaugaaugucugugggcaggaagugaagagauccuucuguaaagguuuuuggaauuaugucugcugaauaauaaacuuuuuugaaauaauaaaucugguagaaaaaugagaucuaaaaaaaaaaaaaaaaaaaaaaaaaaaaaaaaaaaaaaaaaaaaaaaaaaaaaaaaaaaaaaaaugcaucccccccccccccccccccccccccccccccaaaggcucuuuucagagccaccagaauu

SEQ ID NO: 1859 - RNA, 2450 nt, Artificial Sequence
  mRNA product Design g-4 comprising derived and/or modified sequence from YFV__NC_002031.1__X-SS-prME (polyprotein: aa92-778) (opt1)
gggagacuccugucgggcggaaguaggaggaguagaguuuaaaaacaguacucuuuuuccgguucgggacguaguugaagcaacgacaagccggauaaccgcucuugagacaggaagcuuaccaugcggggccugagcucccgcaagcggcgcagccacgacgugcucaccguccaguuccugauccuggggaugcuccugaugaccggcggggugacgcuggugcggaagaaccgcuggcuccugcugaacgucaccuccgaggaccucggcaagaccuucagcguggggaccggcaacugcacgaccaacauccuggaggccaaguacuggugccccgacuccauggaguacaacugcccgaaccugagcccccgggaggagcccgacgacaucgacugcuggugcuacggcguggagaacguccgcguggccuacgggaagugcgacuccgcgggccggagccgccggucccgccgggccaucgaccuccccacccacgagaaccacgggcugaagacccgccaggagaaguggaugacgggccggaugggggagcgccagcugcagaagaucgagcggugguucgugcgcaacccguucuucgccgucaccgcccucaccaucgccuaccuggugggcagcaacaugacccagcggguggucaucgcgcugcucgugcuggccgugggccccgccuacuccgcccacugcaucgggaucacggaccgcgacuucaucgagggcguccacgggggcaccugggugagcgcgacccuggagcaggacaagugcgugaccgucauggcccccgacaagcccucccucgacaucagccuggagacgguggccaucgaccggccggccgaggugcgcaaggucugcuacaacgccgugcugacccacgugaagaucaacgacaagugccccuccaccggcgaggcgcaccucgccgaggagaacgagggggacaacgccugcaagcggaccuacagcgaccggggcugggggaacggcugcgggcuguucggcaagggcuccaucgucgccugcgccaaguucacgugcgcgaaguccaugagccuguucgagguggaccagaccaagauccaguacgucauccgcgcccagcuccacgugggggccaagcaggagaacuggaacaccgacaucaagacccugaaguucgacgcccugagcggcagccaggagguggaguucaucggguacggcaaggccacgcucgagugccagguccagaccgcgguggacuucgggaacuccuacaucgccgagauggagaccgagagcuggaucguggaccggcagugggcccaggaccugacccugcccuggcaguccggcagcggcggggucuggcgcgagaugcaccaccucguggaguucgagcccccgcacgccgccacgauccgggugcuggcgcugggcaaccaggaggggucccucaagaccgcccugaccggcgccaugcgcgucaccaaggacacgaacgacaacaaccuguacaagcuccacgggggccacgugagcugccgggugaagcuguccgcccugacccucaagggcaccagcuacaagaucugcaccgacaagauguucuucgucaagaaccccacggacaccgggcacggcaccguggugaugcaggucaagguguccaagggggcgcccugccgcaucccggugaucgucgccgacgaccugaccgccgccaucaacaagggcauccuggugaccgugaacccgaucgccagcacgaacgacgacgagguccucaucgaggugaacccccccuucggcgacuccuacaucaucguggggcggggcgacagccgccugaccuaccaguggcacaaggagggguccagcaucggcaagcuguucacccagaccaugaagggggucgagcggcuggcggugaugggcgacacggccugggacuucuccagcgccggcggguucuucaccuccgugggcaaggggauccacaccgucuucggcagcgccuuccaggggcuguucggcggccucaacuggaucaccaaggugaucaugggggccgugcugaucugggucggcaucaacacgcgcaacaugaccauguccaugagcaugauccucgugggggugaucaugauguuccugagccugggcgucggggcgugaggacuaguaauaaggaaacuguaugaaugucugugggcaggaagugaagagauccuucuguaaagguuuuuggaauuaugucugcugaauaauaaacuuuuuugaaauaauaaaucugguagaaaaaugagaucuaaaaaaaaaaaaaaaaaaaaaaaaaaaaaaaaaaaaaaaaaaaaaaaaaaaaaaaaaaaaaaaaugcaucccccccccccccccccccccccccccccccaaaggcucuuuucagagccaccagaauu

SEQ ID NO: 1860 - RNA, 2453 nt, Artificial Sequence
  mRNA product Design g-4 comprising derived and/or modified sequence from YFV__NC_002031.1__SSjev(V3)-prME-XX (polyprotein: aa122-788) (opt1)
gggagacuccugucgggcggaaguaggaggaguagaguuuaaaaacaguacucuuuuuccgguucgggacguaguugaagcaacgacaagccggauaaccgcucuugagacaggaagcuuaccaugaacgagggcagcaucauguggcuggccucccucgccguggucaucgcgugcgccggggccgugacgcuggugcggaagaaccgcuggcuccugcugaacgucaccuccgaggaccucggcaagaccuucagcguggggaccggcaacugcacgaccaacauccuggaggccaaguacuggugccccgacuccauggaguacaacugcccgaaccugagcccccgggaggagcccgacgacaucgacugcuggugcuacggcguggagaacguccgcguggccuacgggaagugcgacuccgcgggccggagccgccggucccgccgggccaucgaccuccccacccacgagaaccacgggcugaagacccgccaggagaaguggaugacgggccggaugggggagcgccagcugcagaagaucgagcggugguucgugcgcaacccguucuucgccgucaccgcccucaccaucgccuaccuggugggcagcaacaugacccagcggguggucaucgcgcugcucgugcuggccgugggccccgccuacuccgcccacugcaucgggaucacggaccgcgacuucaucgagggcguccacgggggcaccugggugagcgcgacccuggagcaggacaagugcgugaccgucauggcccccgacaagcccucccucgacaucagccuggagacgguggccaucgaccggccggccgaggugcgcaaggucugcuacaacgccgugcugacccacgugaagaucaacgacaagugccccuccaccggcgaggcgcaccucgccgaggagaacgagggggacaacgccugcaagcggaccuacagcgaccggggcugggggaacggcugcgggcuguucggcaagggcuccaucgucgccugcgccaaguucacgugcgcgaaguccaugagccuguucgagguggaccagaccaagauccaguacgucauccgcgcccagcuccacgugggggccaagcaggagaacuggaacaccgacaucaagacccugaaguucgacgcccugagcggcagccaggagguggaguucaucggguacggcaaggccacgcucgagugccagguccagaccgcgguggacuucgggaacuccuacaucgccgagauggagaccgagagcuggaucguggaccggcagugggcccaggaccugacccugcccuggcaguccggcagcggcggggucuggcgcgagaugcaccaccucguggaguucgagcccccgcacgccgccacgauccgggugcuggcgcugggcaaccaggaggggucccucaagaccgcccugaccggcgccaugcgcgucaccaaggacacgaacgacaacaaccuguacaagcuccacgggggccacgugagcugccgggugaagcuguccgcccugacccucaagggcaccagcuacaagaucugcaccgacaagauguucuucgucaagaaccccacggacaccgggcacggcaccguggugaugcaggucaagguguccaagggggcgcccugccgcaucccggugaucgucgccgacgaccugaccgccgccaucaacaagggcauccuggugaccgugaacccgaucgccagcacgaacgacgacgagguccucaucgaggugaacccccccuucggcgacuccuacaucaucguggggcggggcgacagccgccugaccuaccaguggcacaaggagggguccagcaucggcaagcuguucacccagaccaugaagggggucgagcggcuggcggugaugggcgacacggccugggacuucuccagcgccggcggguucuucaccuccgugggcaaggggauccacaccgucuucggcagcgccuuccaggggcuguucggcggccucaacuggaucaccaaggugaucaugggggccgugcugaucugggucggcaucaacacgcgcaacaugaccauguccaugagcaugauccucgugggggugaucaugauguuccugagccugggcgucggggcggaccagggcugcgccaucaacuucggcaagugaggacuaguaauaaggaaacuguaugaaugucugugggcaggaagugaagagauccuucuguaaagguuuuuggaauuaugucugcugaauaauaaacuuuuuugaaauaauaaaucugguagaaaaaugagaucuaaaaaaaaaaaaaaaaaaaaaaaaaaaaaaaaaaaaaaaaaaaaaaaaaaaaaaaaaaaaaaaaugcaucccccccccccccccccccccccccccccccaaaggcucuuuucagagccaccagaauu

SEQ ID NO: 1861 - RNA, 2462 nt, Artificial Sequence
  mRNA product Design g-4 comprising derived and/or modified sequence from YFV__NC_002031.1__X-SS-prMEdelstem_TM-JEV (polyprotein: aa92-681) (opt1)
gggagacuccugucgggcggaaguaggaggaguagaguuuaaaaacaguacucuuuuuccgguucgggacguaguugaagcaacgacaagccggauaaccgcucuugagacaggaagcuuaccaugcggggccugagcucccgcaagcggcgcagccacgacgugcucaccguccaguuccugauccuggggaugcuccugaugaccggcggggugacgcuggugcggaagaaccgcuggcuccugcugaacgucaccuccgaggaccucggcaagaccuucagcguggggaccggcaacugcacgaccaacauccuggaggccaaguacuggugccccgacuccauggaguacaacugccccaaccugagcccccgggaggagcccgacgacaucgacugcuggugcuacggcguggagaacguccgcguggccuacgggaagugcgacuccgcgggccggagccgccggucccgccgggccaucgaccuccccacccacgagaaccacgggcugaagacccgccaggagaaguggaugacgggccggaugggggagcgccagcugcagaagaucgagcggugguucgugcgcaacccguucuucgccgucaccgcccucaccaucgccuaccuggugggcagcaacaugacccagcggguggucaucgcgcugcucgugcuggccgugggccccgccuacuccgcccacugcaucgggaucacggaccgcgacuucaucgagggcguccacgggggcaccugggugagcgcgacccuggagcaggacaagugcgugaccgucauggcccccgacaagcccucccucgacaucagccuggagacgguggccaucgaccggccggccgaggugcgcaaggucugcuacaacgccgugcugacccacgugaagaucaacgacaagugccccuccaccggcgaggcgcaccucgccgaggagaacgagggggacaacgccugcaagcggaccuacagcgaccggggcugggggaacggcugcgggcuguucggcaagggcuccaucgucgccugcgccaaguucacgugcgcgaaguccaugagccuguucgagguggaccagaccaagauccaguacgucauccgcgcccagcuccacgugggggccaagcaggagaacuggaacaccgacaucaagacccugaaguucgacgcccugagcggcagccaggagguggaguucaucggguacggcaaggccacgcucgagugccagguccagaccgcgguggacuucgggaacuccuacaucgccgagauggagaccgagagcuggaucguggaccggcagugggcccaggaccugacccugcccuggcaguccggcagcggcggggucuggcgcgagaugcaccaccucguggaguucgagcccccgcacgccgccacgauccgggugcuggcgcugggcaaccaggaggggucccucaagaccgcccugaccggcgccaugcgcgucaccaaggacacgaacgacaacaaccuguacaagcuccacgggggccacgugagcugccgggugaagcuguccgcccugacccucaagggcaccagcuacaagaucugcaccgacaagauguucuucgucaagaaccccacggacaccgggcacggcaccguggugaugcaggucaagguguccaagggggcgcccugccgcaucccggugaucgucgccgacgaccugaccgccgccaucaacaagggcauccuggugaccgugaacccgaucgccagcacgaacgacgacgagguccucaucgaggugaacccgcccuucggcgacuccuacaucaucguggggcggggcgacagccgccugaccuaccaguggcacaaggagggguccagcaucggaagcacgcugggcaaggccuuuucaacaacuuugaagggagcucaaagacuggcagcguugggcgacacagccugggacuuuggcucuauuggaggggucuucaacuccauagguagagccguucaccaaguguuuggaggugccuucagaacacucuuugggggaaugucuuggaucacacaagggcuaaugggugcccuacugcucuggaugggcgucaacgcacgagaccgaucaauugcuuuggccuucuuagccacaggaggugugcucguguucuuagcgaccaaugugcacgccugaggacuaguaauaaggaaacuguaugaaugucugugggcaggaagugaagagauccuucuguaaagguuuuuggaauuaugucugcugaauaauaaacuuuuuugaaauaauaaaucugguagaaaaaugagaucuaaaaaaaaaaaaaaaaaaaaaaaaaaaaaaaaaaaaaaaaaaaaaaaaaaaaaaaaaaaaaaaaugcaucccccccccccccccccccccccccccccccaaaggcucuuuucagagccaccagaauu

SEQ ID NO: 1862 - RNA, 2435 nt, Artificial Sequence
  mRNA product Design g-4 comprising derived and/or modified sequence from YFV__NC_002031.1__SSjev(V3)-prMEdelstem_TM-JEV (polyprotein: aa122-681) (opt1)
gggagacuccugucgggcggaaguaggaggaguagaguuuaaaaacaguacucuuuuuccgguucgggacguaguugaagcaacgacaagccggauaaccgcucuugagacaggaagcuuaccaugaacgagggcagcaucauguggcuggccucccucgccguggucaucgcgugcgccggggccgugacgcuggugcggaagaaccgcuggcuccugcugaacgucaccuccgaggaccucggcaagaccuucagcguggggaccggcaacugcacgaccaacauccuggaggccaaguacuggugccccgacuccauggaguacaacugccccaaccugagcccccgggaggagcccgacgacaucgacugcuggugcuacggcguggagaacguccgcguggccuacgggaagugcgacuccgcgggccggagccgccggucccgccgggccaucgaccuccccacccacgagaaccacgggcugaagacccgccaggagaaguggaugacgggccggaugggggagcgccagcugcagaagaucgagcggugguucgugcgcaacccguucuucgccgucaccgcccucaccaucgccuaccuggugggcagcaacaugacccagcggguggucaucgcgcugcucgugcuggccgugggccccgccuacuccgcccacugcaucgggaucacggaccgcgacuucaucgagggcguccacgggggcaccugggugagcgcgacccuggagcaggacaagugcgugaccgucauggcccccgacaagcccucccucgacaucagccuggagacgguggccaucgaccggccggccgaggugcgcaaggucugcuacaacgccgugcugacccacgugaagaucaacgacaagugccccuccaccggcgaggcgcaccucgccgaggagaacgagggggacaacgccugcaagcggaccuacagcgaccggggcugggggaacggcugcgggcuguucggcaagggcuccaucgucgccugcgccaaguucacgugcgcgaaguccaugagccuguucgagguggaccagaccaagauccaguacgucauccgcgcccagcuccacgugggggccaagcaggagaacuggaacaccgacaucaagacccugaaguucgacgcccugagcggcagccaggagguggaguucaucggguacggcaaggccacgcucgagugccagguccagaccgcgguggacuucgggaacuccuacaucgccgagauggagaccgagagcuggaucguggaccggcagugggcccaggaccugacccugcccuggcaguccggcagcggcggggucuggcgcgagaugcaccaccucguggaguucgagcccccgcacgccgccacgauccgggugcuggcgcugggcaaccaggaggggucccucaagaccgcccugaccggcgccaugcgcgucaccaaggacacgaacgacaacaaccuguacaagcuccacgggggccacgugagcugccgggugaagcuguccgcccugacccucaagggcaccagcuacaagaucugcaccgacaagauguucuucgucaagaaccccacggacaccgggcacggcaccguggugaugcaggucaagguguccaagggggcgcccugccgcaucccggugaucgucgccgacgaccugaccgccgccaucaacaagggcauccuggugaccgugaacccgaucgccagcacgaacgacgacgagguccucaucgaggugaacccgcccuucggcgacuccuacaucaucguggggcggggcgacagccgccugaccuaccaguggcacaaggagggguccagcaucggcagcacccuggggaaggccuucuccaccacgcucaagggcgcccagcgccuggcggcccugggggacaccgccugggacuucggcagcaucgggggcguguucaacuccaucggccgggccguccaccagguguucgggggcgccuuccgcacccucuucgggggcaugagcuggaucacccaggggcugaugggcgcgcugcuccuguggaugggggugaacgcccgggaccgcuccaucgcccuggccuuccucgcgacgggcggcguccugguguuccuggccaccaacgugcacgccugaggacuaguaauaaggaaacuguaugaaugucugugggcaggaagugaagagauccuucuguaaagguuuuuggaauuaugucugcugaauaauaaacuuuuuugaaauaauaaaucugguagaaaaaugagaucuaaaaaaaaaaaaaaaaaaaaaaaaaaaaaaaaaaaaaaaaaaaaaaaaaaaaaaaaaaaaaaaaugcaucccccccccccccccccccccccccccccccaaaggcucuuuucagagccaccagaauu

SEQ ID NO: 1863 - RNA, 2450 nt, Artificial Sequence
  mRNA product Design g-4 comprising derived and/or modified sequence from YFV__NC_002031.1__X-SS-prME (polyprotein: aa92-778) (opt1)
gggagacuccugucgggcggaaguaggaggaguagaguuuaaaaacaguacucuuuuuccgguucgggacguaguugaagcaacgacaagccggauaaccgcucuugagacaggaagcuuaccaugcggggccugagcucccgcaagcggcgcagccacgacgugcucaccguccaguuccugauccuggggaugcuccugaugaccggcggggugacgcuggugcggaagaaccgcuggcuccugcugaacgucaccuccgaggaccucggcaagaccuucagcguggggaccggcaacugcacgaccaacauccuggaggccaaguacuggugccccgacuccauggaguacaacugccccaaccugagcccccgggaggagcccgacgacaucgacugcuggugcuacggcguggagaacguccgcguggccuacgggaagugcgacuccgcgggccggagccgccggucccgccgggccaucgaccuccccacccacgagaaccacgggcugaagacccgccaggagaaguggaugacgggccggaugggggagcgccagcugcagaagaucgagcggugguucgugcgcaacccguucuucgccgucaccgcccucaccaucgccuaccuggugggcagcaacaugacccagcggguggucaucgcgcugcucgugcuggccgugggccccgccuacuccgcccacugcaucgggaucacggaccgcgacuucaucgagggcguccacgggggcaccugggugagcgcgacccuggagcaggacaagugcgugaccgucauggcccccgacaagcccucccucgacaucagccuggagacgguggccaucgaccggccggccgaggugcgcaaggucugcuacaacgccgugcugacccacgugaagaucaacgacaagugccccuccaccggcgaggcgcaccucgccgaggagaacgagggggacaacgccugcaagcggaccuacagcgaccggggcugggggaacggcugcgggcuguucggcaagggcuccaucgucgccugcgccaaguucacgugcgcgaaguccaugagccuguucgagguggaccagaccaagauccaguacgucauccgcgcccagcuccacgugggggccaagcaggagaacuggaacaccgacaucaagacccugaaguucgacgcccugagcggcagccaggagguggaguucaucggguacggcaaggccacgcucgagugccagguccagaccgcgguggacuucgggaacuccuacaucgccgagauggagaccgagagcuggaucguggaccggcagugggcccaggaccugacccugcccuggcaguccggcagcggcggggucuggcgcgagaugcaccaccucguggaguucgagcccccgcacgccgccacgauccgggugcuggcgcugggcaaccaggaggggucccucaagaccgcccugaccggcgccaugcgcgucaccaaggacacgaacgacaacaaccuguacaagcuccacgggggccacgugagcugccgggugaagcuguccgcccugacccucaagggcaccagcuacaagaucugcaccgacaagauguucuucgucaagaaccccacggacaccgggcacggcaccguggugaugcaggucaagguguccaagggggcgcccugccgcaucccggugaucgucgccgacgaccugaccgccgccaucaacaagggcauccuggugaccgugaacccgaucgccagcacgaacgacgacgagguccucaucgaggugaacccgcccuucggcgacuccuacaucaucguggggcggggcgacagccgccugaccuaccaguggcacaaggagggguccagcaucggcaagcuguucacccagaccaugaagggggucgagcggcuggcggugaugggcgacacggccugggacuucuccagcgccggcggguucuucaccuccgugggcaaggggauccacaccgucuucggcagcgccuuccaggggcuguucggcggccucaacuggaucaccaaggugaucaugggggccgugcugaucugggucggcaucaacacgcgcaacaugaccauguccaugagcaugauccucgugggggugaucaugauguuccugagccugggcgucggggcgugaggacuaguaauaaggaaacuguaugaaugucugugggcaggaagugaagagauccuucuguaaagguuuuuggaauuaugucugcugaauaauaaacuuuuuugaaauaauaaaucugguagaaaaaugagaucuaaaaaaaaaaaaaaaaaaaaaaaaaaaaaaaaaaaaaaaaaaaaaaaaaaaaaaaaaaaaaaaaugcaucccccccccccccccccccccccccccccccaaaggcucuuuucagagccaccagaauu

SEQ ID NO: 1864 - RNA, 2453 nt, Artificial Sequence
  mRNA product Design g-4 comprising derived and/or modified sequence from YFV__NC_002031.1__SSjev(V3)-prME-XX (polyprotein: aa122-788) (opt1)
gggagacuccugucgggcggaaguaggaggaguagaguuuaaaaacaguacucuuuuuccgguucgggacguaguugaagcaacgacaagccggauaaccgcucuugagacaggaagcuuaccaugaacgagggcagcaucauguggcuggccucccucgccguggucaucgcgugcgccggggccgugacgcuggugcggaagaaccgcuggcuccugcugaacgucaccuccgaggaccucggcaagaccuucagcguggggaccggcaacugcacgaccaacauccuggaggccaaguacuggugccccgacuccauggaguacaacugccccaaccugagcccccgggaggagcccgacgacaucgacugcuggugcuacggcguggagaacguccgcguggccuacgggaagugcgacuccgcgggccggagccgccggucccgccgggccaucgaccuccccacccacgagaaccacgggcugaagacccgccaggagaaguggaugacgggccggaugggggagcgccagcugcagaagaucgagcggugguucgugcgcaacccguucuucgccgucaccgcccucaccaucgccuaccuggugggcagcaacaugacccagcggguggucaucgcgcugcucgugcuggccgugggccccgccuacuccgcccacugcaucgggaucacggaccgcgacuucaucgagggcguccacgggggcaccugggugagcgcgacccuggagcaggacaagugcgugaccgucauggcccccgacaagcccucccucgacaucagccuggagacgguggccaucgaccggccggccgaggugcgcaaggucugcuacaacgccgugcugacccacgugaagaucaacgacaagugccccuccaccggcgaggcgcaccucgccgaggagaacgagggggacaacgccugcaagcggaccuacagcgaccggggcugggggaacggcugcgggcuguucggcaagggcuccaucgucgccugcgccaaguucacgugcgcgaaguccaugagccuguucgagguggaccagaccaagauccaguacgucauccgcgcccagcuccacgugggggccaagcaggagaacuggaacaccgacaucaagacccugaaguucgacgcccugagcggcagccaggagguggaguucaucggguacggcaaggccacgcucgagugccagguccagaccgcgguggacuucgggaacuccuacaucgccgagauggagaccgagagcuggaucguggaccggcagugggcccaggaccugacccugcccuggcaguccggcagcggcggggucuggcgcgagaugcaccaccucguggaguucgagcccccgcacgccgccacgauccgggugcuggcgcugggcaaccaggaggggucccucaagaccgcccugaccggcgccaugcgcgucaccaaggacacgaacgacaacaaccuguacaagcuccacgggggccacgugagcugccgggugaagcuguccgcccugacccucaagggcaccagcuacaagaucugcaccgacaagauguucuucgucaagaaccccacggacaccgggcacggcaccguggugaugcaggucaagguguccaagggggcgcccugccgcaucccggugaucgucgccgacgaccugaccgccgccaucaacaagggcauccuggugaccgugaacccgaucgccagcacgaacgacgacgagguccucaucgaggugaacccgcccuucggcgacuccuacaucaucguggggcggggcgacagccgccugaccuaccaguggcacaaggagggguccagcaucggcaagcuguucacccagaccaugaagggggucgagcggcuggcggugaugggcgacacggccugggacuucuccagcgccggcggguucuucaccuccgugggcaaggggauccacaccgucuucggcagcgccuuccaggggcuguucggcggccucaacuggaucaccaaggugaucaugggggccgugcugaucugggucggcaucaacacgcgcaacaugaccauguccaugagcaugauccucgugggggugaucaugauguuccugagccugggcgucggggcggaccagggcugcgccaucaacuucggcaagugaggacuaguaauaaggaaacuguaugaaugucugugggcaggaagugaagagauccuucuguaaagguuuuuggaauuaugucugcugaauaauaaacuuuuuugaaauaauaaaucugguagaaaaaugagaucuaaaaaaaaaaaaaaaaaaaaaaaaaaaaaaaaaaaaaaaaaaaaaaaaaaaaaaaaaaaaaaaaugcaucccccccccccccccccccccccccccccccaaaggcucuuuucagagccaccagaauu

SEQ ID NO: 1865 - RNA, 2462 nt, Artificial Sequence
  mRNA product Design g-4 comprising derived and/or modified sequence from YFV__NC_002031.1__X-SS-prMEdelstem_TM-JEV (polyprotein: aa92-681) (opt2)
gggagacuccugucgggcggaaguaggaggaguagaguuuaaaaacaguacucuuuuuccgguucgggacguaguugaagcaacgacaagccggauaaccgcucuugagacaggaagcuuaccaugcgcggccucuccucccgcaagcgccgcucccacgacguccucaccguccaguuccucauccucggcaugcuccucaugaccggcggcgucacccucguccgcaagaaccgcuggcuccuccucaacgucaccuccgaggaccucggcaagaccuucuccgucggcaccggcaacugcaccaccaacauccucgaggccaaguacuggugccccgacuccauggaguacaacugccccaaccucuccccccgcgaggagcccgacgacaucgacugcuggugcuacggcgucgagaacguccgcgucgccuacggcaagugcgacuccgccggccgcucccgccgcucccgccgcgccaucgaccuccccacccacgagaaccacggccucaagacccgccaggagaaguggaugaccggccgcaugggcgagcgccagcuccagaagaucgagcgcugguucguccgcaaccccuucuucgccgucaccgcccucaccaucgccuaccucgucggcuccaacaugacccagcgcgucgucaucgcccuccucguccucgccgucggccccgccuacuccgcccacugcaucggcaucaccgaccgcgacuucaucgagggcguccacggcggcaccugggucuccgccacccucgagcaggacaagugcgucaccgucauggcccccgacaagcccucccucgacaucucccucgagaccgucgccaucgaccgccccgccgagguccgcaaggucugcuacaacgccguccucacccacgucaagaucaacgacaagugccccuccaccggcgaggcccaccucgccgaggagaacgagggcgacaacgccugcaagcgcaccuacuccgaccgcggcuggggcaacggcugcggccucuucggcaagggcuccaucgucgccugcgccaaguucaccugcgccaaguccaugucccucuucgaggucgaccagaccaagauccaguacgucauccgcgcccagcuccacgucggcgccaagcaggagaacuggaacaccgacaucaagacccucaaguucgacgcccucuccggcucccaggaggucgaguucaucggcuacggcaaggccacccucgagugccagguccagaccgccgucgacuucggcaacuccuacaucgccgagauggagaccgaguccuggaucgucgaccgccagugggcccaggaccucacccuccccuggcaguccggcuccggcggcgucuggcgcgagaugcaccaccucgucgaguucgagcccccccacgccgccaccauccgcguccucgcccucggcaaccaggagggcucccucaagaccgcccucaccggcgccaugcgcgucaccaaggacaccaacgacaacaaccucuacaagcuccacggcggccacgucuccugccgcgucaagcucuccgcccucacccucaagggcaccuccuacaagaucugcaccgacaagauguucuucgucaagaaccccaccgacaccggccacggcaccgucgucaugcaggucaaggucuccaagggcgcccccugccgcauccccgucaucgucgccgacgaccucaccgccgccaucaacaagggcauccucgucaccgucaaccccaucgccuccaccaacgacgacgagguccucaucgaggucaacccccccuucggcgacuccuacaucaucgucggccgcggcgacucccgccucaccuaccaguggcacaaggagggcuccuccaucggcuccacccucggcaaggccuucuccaccacccucaagggcgcccagcgccucgccgcccucggcgacaccgccugggacuucggcuccaucggcggcgucuucaacuccaucggccgcgccguccaccaggucuucggcggcgccuuccgcacccucuucggcggcauguccuggaucacccagggccucaugggcgcccuccuccucuggaugggcgucaacgcccgcgaccgcuccaucgcccucgccuuccucgccaccggcggcguccucgucuuccucgccaccaacguccacgccugaggacuaguaauaaggaaacuguaugaaugucugugggcaggaagugaagagauccuucuguaaagguuuuuggaauuaugucugcugaauaauaaacuuuuuugaaauaauaaaucugguagaaaaaugagaucuaaaaaaaaaaaaaaaaaaaaaaaaaaaaaaaaaaaaaaaaaaaaaaaaaaaaaaaaaaaaaaaaugcaucccccccccccccccccccccccccccccccaaaggcucuuuucagagccaccagaauu

SEQ ID NO: 1866 - RNA, 2435 nt, Artificial Sequence
  mRNA product Design g-4 comprising derived and/or modified sequence from YFV__NC_002031.1__SSjev(V3)-prMEdelstem_TM-JEV (polyprotein: aa122-681) (opt2)
gggagacuccugucgggcggaaguaggaggaguagaguuuaaaaacaguacucuuuuuccgguucgggacguaguugaagcaacgacaagccggauaaccgcucuugagacaggaagcuuaccaugaacgagggcuccaucauguggcucgccucccucgccgucgucaucgccugcgccggcgccgucacccucguccgcaagaaccgcuggcuccuccucaacgucaccuccgaggaccucggcaagaccuucuccgucggcaccggcaacugcaccaccaacauccucgaggccaaguacuggugccccgacuccauggaguacaacugccccaaccucuccccccgcgaggagcccgacgacaucgacugcuggugcuacggcgucgagaacguccgcgucgccuacggcaagugcgacuccgccggccgcucccgccgcucccgccgcgccaucgaccuccccacccacgagaaccacggccucaagacccgccaggagaaguggaugaccggccgcaugggcgagcgccagcuccagaagaucgagcgcugguucguccgcaaccccuucuucgccgucaccgcccucaccaucgccuaccucgucggcuccaacaugacccagcgcgucgucaucgcccuccucguccucgccgucggccccgccuacuccgcccacugcaucggcaucaccgaccgcgacuucaucgagggcguccacggcggcaccugggucuccgccacccucgagcaggacaagugcgucaccgucauggcccccgacaagcccucccucgacaucucccucgagaccgucgccaucgaccgccccgccgagguccgcaaggucugcuacaacgccguccucacccacgucaagaucaacgacaagugccccuccaccggcgaggcccaccucgccgaggagaacgagggcgacaacgccugcaagcgcaccuacuccgaccgcggcuggggcaacggcugcggccucuucggcaagggcuccaucgucgccugcgccaaguucaccugcgccaaguccaugucccucuucgaggucgaccagaccaagauccaguacgucauccgcgcccagcuccacgucggcgccaagcaggagaacuggaacaccgacaucaagacccucaaguucgacgcccucuccggcucccaggaggucgaguucaucggcuacggcaaggccacccucgagugccagguccagaccgccgucgacuucggcaacuccuacaucgccgagauggagaccgaguccuggaucgucgaccgccagugggcccaggaccucacccuccccuggcaguccggcuccggcggcgucuggcgcgagaugcaccaccucgucgaguucgagcccccccacgccgccaccauccgcguccucgcccucggcaaccaggagggcucccucaagaccgcccucaccggcgccaugcgcgucaccaaggacaccaacgacaacaaccucuacaagcuccacggcggccacgucuccugccgcgucaagcucuccgcccucacccucaagggcaccuccuacaagaucugcaccgacaagauguucuucgucaagaaccccaccgacaccggccacggcaccgucgucaugcaggucaaggucuccaagggcgcccccugccgcauccccgucaucgucgccgacgaccucaccgccgccaucaacaagggcauccucgucaccgucaaccccaucgccuccaccaacgacgacgagguccucaucgaggucaacccccccuucggcgacuccuacaucaucgucggccgcggcgacucccgccucaccuaccaguggcacaaggagggcuccuccaucggcuccacccucggcaaggccuucuccaccacccucaagggcgcccagcgccucgccgcccucggcgacaccgccugggacuucggcuccaucggcggcgucuucaacuccaucggccgcgccguccaccaggucuucggcggcgccuuccgcacccucuucggcggcauguccuggaucacccagggccucaugggcgcccuccuccucuggaugggcgucaacgcccgcgaccgcuccaucgcccucgccuuccucgccaccggcggcguccucgucuuccucgccaccaacguccacgccugaggacuaguaauaaggaaacuguaugaaugucugugggcaggaagugaagagauccuucuguaaagguuuuuggaauuaugucugcugaauaauaaacuuuuuugaaauaauaaaucugguagaaaaaugagaucuaaaaaaaaaaaaaaaaaaaaaaaaaaaaaaaaaaaaaaaaaaaaaaaaaaaaaaaaaaaaaaaaugcaucccccccccccccccccccccccccccccccaaaggcucuuuucagagccaccagaauu

SEQ ID NO: 1867 - RNA, 2450 nt, Artificial Sequence
  mRNA product Design g-4 comprising derived and/or modified sequence from YFV__NC_002031.1__X-SS-prME (polyprotein: aa92-778) (opt2)
gggagacuccugucgggcggaaguaggaggaguagaguuuaaaaacaguacucuuuuuccgguucgggacguaguugaagcaacgacaagccggauaaccgcucuugagacaggaagcuuaccaugcgcggccucuccucccgcaagcgccgcucccacgacguccucaccguccaguuccucauccucggcaugcuccucaugaccggcggcgucacccucguccgcaagaaccgcuggcuccuccucaacgucaccuccgaggaccucggcaagaccuucuccgucggcaccggcaacugcaccaccaacauccucgaggccaaguacuggugccccgacuccauggaguacaacugccccaaccucuccccccgcgaggagcccgacgacaucgacugcuggugcuacggcgucgagaacguccgcgucgccuacggcaagugcgacuccgccggccgcucccgccgcucccgccgcgccaucgaccuccccacccacgagaaccacggccucaagacccgccaggagaaguggaugaccggccgcaugggcgagcgccagcuccagaagaucgagcgcugguucguccgcaaccccuucuucgccgucaccgcccucaccaucgccuaccucgucggcuccaacaugacccagcgcgucgucaucgcccuccucguccucgccgucggccccgccuacuccgcccacugcaucggcaucaccgaccgcgacuucaucgagggcguccacggcggcaccugggucuccgccacccucgagcaggacaagugcgucaccgucauggcccccgacaagcccucccucgacaucucccucgagaccgucgccaucgaccgccccgccgagguccgcaaggucugcuacaacgccguccucacccacgucaagaucaacgacaagugccccuccaccggcgaggcccaccucgccgaggagaacgagggcgacaacgccugcaagcgcaccuacuccgaccgcggcuggggcaacggcugcggccucuucggcaagggcuccaucgucgccugcgccaaguucaccugcgccaaguccaugucccucuucgaggucgaccagaccaagauccaguacgucauccgcgcccagcuccacgucggcgccaagcaggagaacuggaacaccgacaucaagacccucaaguucgacgcccucuccggcucccaggaggucgaguucaucggcuacggcaaggccacccucgagugccagguccagaccgccgucgacuucggcaacuccuacaucgccgagauggagaccgaguccuggaucgucgaccgccagugggcccaggaccucacccuccccuggcaguccggcuccggcggcgucuggcgcgagaugcaccaccucgucgaguucgagcccccccacgccgccaccauccgcguccucgcccucggcaaccaggagggcucccucaagaccgcccucaccggcgccaugcgcgucaccaaggacaccaacgacaacaaccucuacaagcuccacggcggccacgucuccugccgcgucaagcucuccgcccucacccucaagggcaccuccuacaagaucugcaccgacaagauguucuucgucaagaaccccaccgacaccggccacggcaccgucgucaugcaggucaaggucuccaagggcgcccccugccgcauccccgucaucgucgccgacgaccucaccgccgccaucaacaagggcauccucgucaccgucaaccccaucgccuccaccaacgacgacgagguccucaucgaggucaacccccccuucggcgacuccuacaucaucgucggccgcggcgacucccgccucaccuaccaguggcacaaggagggcuccuccaucggcaagcucuucacccagaccaugaagggcgucgagcgccucgccgucaugggcgacaccgccugggacuucuccuccgccggcggcuucuucaccuccgucggcaagggcauccacaccgucuucggcuccgccuuccagggccucuucggcggccucaacuggaucaccaaggucaucaugggcgccguccucaucugggucggcaucaacacccgcaacaugaccauguccauguccaugauccucgucggcgucaucaugauguuccucucccucggcgucggcgccugaggacuaguaauaaggaaacuguaugaaugucugugggcaggaagugaagagauccuucuguaaagguuuuuggaauuaugucugcugaauaauaaacuuuuuugaaauaauaaaucugguagaaaaaugagaucuaaaaaaaaaaaaaaaaaaaaaaaaaaaaaaaaaaaaaaaaaaaaaaaaaaaaaaaaaaaaaaaaugcaucccccccccccccccccccccccccccccccaaaggcucuuuucagagccaccagaauu

SEQ ID NO: 1868 - RNA, 2453 nt, Artificial Sequence
  mRNA product Design g-4 comprising derived and/or modified sequence from YFV__NC_002031.1__SSjev(V3)-prME-XX (polyprotein: aa122-788) (opt2)
gggagacuccugucgggcggaaguaggaggaguagaguuuaaaaacaguacucuuuuuccgguucgggacguaguugaagcaacgacaagccggauaaccgcucuugagacaggaagcuuaccaugaacgagggcuccaucauguggcucgccucccucgccgucgucaucgccugcgccggcgccgucacccucguccgcaagaaccgcuggcuccuccucaacgucaccuccgaggaccucggcaagaccuucuccgucggcaccggcaacugcaccaccaacauccucgaggccaaguacuggugccccgacuccauggaguacaacugccccaaccucuccccccgcgaggagcccgacgacaucgacugcuggugcuacggcgucgagaacguccgcgucgccuacggcaagugcgacuccgccggccgcucccgccgcucccgccgcgccaucgaccuccccacccacgagaaccacggccucaagacccgccaggagaaguggaugaccggccgcaugggcgagcgccagcuccagaagaucgagcgcugguucguccgcaaccccuucuucgccgucaccgcccucaccaucgccuaccucgucggcuccaacaugacccagcgcgucgucaucgcccuccucguccucgccgucggccccgccuacuccgcccacugcaucggcaucaccgaccgcgacuucaucgagggcguccacggcggcaccugggucuccgccacccucgagcaggacaagugcgucaccgucauggcccccgacaagcccucccucgacaucucccucgagaccgucgccaucgaccgccccgccgagguccgcaaggucugcuacaacgccguccucacccacgucaagaucaacgacaagugccccuccaccggcgaggcccaccucgccgaggagaacgagggcgacaacgccugcaagcgcaccuacuccgaccgcggcuggggcaacggcugcggccucuucggcaagggcuccaucgucgccugcgccaaguucaccugcgccaaguccaugucccucuucgaggucgaccagaccaagauccaguacgucauccgcgcccagcuccacgucggcgccaagcaggagaacuggaacaccgacaucaagacccucaaguucgacgcccucuccggcucccaggaggucgaguucaucggcuacggcaaggccacccucgagugccagguccagaccgccgucgacuucggcaacuccuacaucgccgagauggagaccgaguccuggaucgucgaccgccagugggcccaggaccucacccuccccuggcaguccggcuccggcggcgucuggcgcgagaugcaccaccucgucgaguucgagcccccccacgccgccaccauccgcguccucgcccucggcaaccaggagggcucccucaagaccgcccucaccggcgccaugcgcgucaccaaggacaccaacgacaacaaccucuacaagcuccacggcggccacgucuccugccgcgucaagcucuccgcccucacccucaagggcaccuccuacaagaucugcaccgacaagauguucuucgucaagaaccccaccgacaccggccacggcaccgucgucaugcaggucaaggucuccaagggcgcccccugccgcauccccgucaucgucgccgacgaccucaccgccgccaucaacaagggcauccucgucaccgucaaccccaucgccuccaccaacgacgacgagguccucaucgaggucaacccccccuucggcgacuccuacaucaucgucggccgcggcgacucccgccucaccuaccaguggcacaaggagggcuccuccaucggcaagcucuucacccagaccaugaagggcgucgagcgccucgccgucaugggcgacaccgccugggacuucuccuccgccggcggcuucuucaccuccgucggcaagggcauccacaccgucuucggcuccgccuuccagggccucuucggcggccucaacuggaucaccaaggucaucaugggcgccguccucaucugggucggcaucaacacccgcaacaugaccauguccauguccaugauccucgucggcgucaucaugauguuccucucccucggcgucggcgccgaccagggcugcgccaucaacuucggcaagugaggacuaguaauaaggaaacuguaugaaugucugugggcaggaagugaagagauccuucuguaaagguuuuuggaauuaugucugcugaauaauaaacuuuuuugaaauaauaaaucugguagaaaaaugagaucuaaaaaaaaaaaaaaaaaaaaaaaaaaaaaaaaaaaaaaaaaaaaaaaaaaaaaaaaaaaaaaaaugcaucccccccccccccccccccccccccccccccaaaggcucuuuucagagccaccagaauu

SEQ ID NO: 1869 - RNA, 2462 nt, Artificial Sequence
  mRNA product Design g-4 comprising derived and/or modified sequence from YFV__NC_002031.1__X-SS-prMEdelstem_TM-JEV (polyprotein: aa92-681) (opt3)
gggagacuccugucgggcggaaguaggaggaguagaguuuaaaaacaguacucuuuuuccgguucgggacguaguugaagcaacgacaagccggauaaccgcucuugagacaggaagcuuaccaugagaggccugagcuccaggaagcggcgcucucacgacgugcucaccguccaguuccuuauccuggggauguuguuaaugacaggagguguuacucuggugcguaaaaaccgauggcuacuccugaauguaacgucagaggaucuuggcaagaccuuuaguguggggacaggaaacugcacuaccaauauucuggaagccaaauacuggugucccgacagcauggaguauaacugcccuaauuuguccccaagagaggaaccggaugacauagauuguuggugcuacggcgucgaaaacgugaggguugcuuaugguaagugugacucugcagggcggucgcgcagaucaaggcgggccaucgaucuccccacacaugagaaucacggacugaaaacccgccaagagaaguggaugacuggccgaaugggcgaaagacagcugcagaagauugagaggugguucgugcggaacccuuucuucgcggucacagcucucaccaucgccuacuuaguggggagcaauaugacgcagcguguaguuauugcacugcuuguguuggccgucggaccagcuuauagugcacauugcaucgguauaacugaccgcgauuuuaucgaaggcgugcacgggggaaccuggguguccgccacacuggagcaagacaaaugugucacuguuauggcucccgauaagccuucucuagacauuagccucgagaccguggccaucgauagaccagcggaaguaaggaaagugugcuacaacgcaguccugacacaugugaagauuaaugacaaaugucccuccaccggcgaggcccaccuugcugaagagaacgaaggugacaaugccugcaagcggacguauucagaucgaggguggggaaacggcuguggccuguucgggaagggaaguaucguugcaugcgcuaaauuuacuugcgccaagagcaugucuuuguucgagguggaccagacaaaaauacaguacgucauucgcgcgcagcuccacgugggugccaagcaagagaauuggaacaccgauaucaaaacucugaaguuugacgcauuauccggcucacaggaaguagaguucauuggguacggaaaagcuacacuggaaugucagguucagaccgccguggauuuuggcaacagcuauaucgcugagauggaaacggagaguuggaucgucgacagacaaugggcccaggaucucacccuuccuuggcagucugguuccgggggcguguggagggagaugcaucaccuggucgaauuugagccaccgcaugcagccacaauucggguguuggcucuaggaaaucaagaaggcagccugaagacugcgcucaccggggcaaugcgcguuacaaaggacacuaacgauaauaaccuguacaaacuucacggaggucacgugucgugcagaguaaagcugucugccuugacccucaaaggcacauccuauaagauauguaccgacaaaauguuuuucgucaagaaucccacugauacggggcauggaacagugguuaugcaagugaaggucucaaaaggcgcuccuugcaggaucccagugauuguagccgacgaccugaccgcagccaucaacaaggguauauuagugacuguuaaucccauugcuaguaccaacgaugacgagguccugaucgaagugaauccuccauucggggauagcuacaucauugugggccguggagacucccggcuaacauaucaguggcacaaagagggcucuagcaucggcagcacccuggggaaggccuucuccacaacucucaaaggagcucagagacuugcagcccugggugacacggcgugggauuuuggcucuaucgggggaguguucaacucaauuggcagggcuguccaccaaguuuuugguggggccuuccggaccuuguuuggaggcaugaguuggauaacacagggcuuaaugggggcacugcuacucuggaugggagugaaugcccgcgaccgaagcaucgcucuggcauuccuugccacugguggcguacugguguuuuuggcuaccaacguccaugccugaggacuaguaauaaggaaacuguaugaaugucugugggcaggaagugaagagauccuucuguaaagguuuuuggaauuaugucugcugaauaauaaacuuuuuugaaauaauaaaucugguagaaaaaugagaucuaaaaaaaaaaaaaaaaaaaaaaaaaaaaaaaaaaaaaaaaaaaaaaaaaaaaaaaaaaaaaaaaugcaucccccccccccccccccccccccccccccccaaaggcucuuuucagagccaccagaauu

SEQ ID NO: 1870 - RNA, 2435 nt, Artificial Sequence
  mRNA product Design g-4 comprising derived and/or modified sequence from YFV__NC_002031.1__SSjev(V3)-prMEdelstem_TM-JEV (polyprotein: aa122-681) (opt3)
gggagacuccugucgggcggaaguaggaggaguagaguuuaaaaacaguacucuuuuuccgguucgggacguaguugaagcaacgacaagccggauaaccgcucuugagacaggaagcuuaccaugaacgagggcagcaucauguggcuggccucccucgcuguggucauugcaugcgccggggcgguuacucuggugcguaaaaaccgauggcuacuccugaauguaacgucagaggaucuuggcaagaccuuuaguguggggacaggaaacugcacuaccaauauucuggaagccaaauacuggugucccgacagcauggaguauaacugcccuaauuuguccccaagagaggaaccggaugacauagauuguuggugcuacggcgucgaaaacgugaggguugcuuaugguaagugugacucugcagggcggucgcgcagaucaaggcgggccaucgaucuccccacacaugagaaucacggacugaaaacccgccaagagaaguggaugacuggccgaaugggcgaaagacagcugcagaagauugagaggugguucgugcggaacccuuucuucgcggucacagcucucaccaucgccuacuuaguggggagcaauaugacgcagcguguaguuauugcacugcuuguguuggccgucggaccagcuuauagugcacauugcaucgguauaacugaccgcgauuuuaucgaaggcgugcacgggggaaccuggguguccgccacacuggagcaagacaaaugugucacuguuauggcucccgauaagccuucucuagacauuagccucgagaccguggccaucgauagaccagcggaaguaaggaaagugugcuacaacgcaguccugacacaugugaagauuaaugacaaaugucccuccaccggcgaggcccaccuugcugaagagaacgaaggugacaaugccugcaagcggacguauucagaucgaggguggggaaacggcuguggccuguucgggaagggaaguaucguugcaugcgcuaaauuuacuugcgccaagagcaugucuuuguucgagguggaccagacaaaaauacaguacgucauucgcgcgcagcuccacgugggugccaagcaagagaauuggaacaccgauaucaaaacucugaaguuugacgcauuauccggcucacaggaaguagaguucauuggguacggaaaagcuacacuggaaugucagguucagaccgccguggauuuuggcaacagcuauaucgcugagauggaaacggagaguuggaucgucgacagacaaugggcccaggaucucacccuuccuuggcagucugguuccgggggcguguggagggagaugcaucaccuggucgaauuugagccaccgcaugcagccacaauucggguguuggcucuaggaaaucaagaaggcagccugaagacugcgcucaccggggcaaugcgcguuacaaaggacacuaacgauaauaaccuguacaaacuucacggaggucacgugucgugcagaguaaagcugucugccuugacccucaaaggcacauccuauaagauauguaccgacaaaauguuuuucgucaagaaucccacugauacggggcauggaacagugguuaugcaagugaaggucucaaaaggcgcuccuugcaggaucccagugauuguagccgacgaccugaccgcagccaucaacaaggguauauuagugacuguuaaucccauugcuaguaccaacgaugacgagguccugaucgaagugaauccuccauucggggauagcuacaucauugugggccguggagacucccggcuaacauaucaguggcacaaagagggcucuagcaucggcagcacccuggggaaggccuucuccacaacucucaaaggagcucagagacuugcagcccugggugacacggcgugggauuuuggcucuaucgggggaguguucaacucaauuggcagggcuguccaccaaguuuuugguggggccuuccggaccuuguuuggaggcaugaguuggauaacacagggcuuaaugggggcacugcuacucuggaugggagugaaugcccgcgaccgaagcaucgcucuggcauuccuugccacugguggcguacugguguuuuuggcuaccaacguccaugccugaggacuaguaauaaggaaacuguaugaaugucugugggcaggaagugaagagauccuucuguaaagguuuuuggaauuaugucugcugaauaauaaacuuuuuugaaauaauaaaucugguagaaaaaugagaucuaaaaaaaaaaaaaaaaaaaaaaaaaaaaaaaaaaaaaaaaaaaaaaaaaaaaaaaaaaaaaaaaugcaucccccccccccccccccccccccccccccccaaaggcucuuuucagagccaccagaauu

SEQ ID NO: 1871 - RNA, 2450 nt, Artificial Sequence
  mRNA product Design g-4 comprising derived and/or modified sequence from YFV__NC_002031.1__X-SS-prME (polyprotein: aa92-778) (opt3)
gggagacuccugucgggcggaaguaggaggaguagaguuuaaaaacaguacucuuuuuccgguucgggacguaguugaagcaacgacaagccggauaaccgcucuugagacaggaagcuuaccaugagaggccugagcuccaggaagcggcgcucucacgacgugcucaccguccaguuccuuauccuggggauguuguuaaugacaggagguguuacucuggugcguaaaaaccgauggcuacuccugaauguaacgucagaggaucuuggcaagaccuuuaguguggggacaggaaacugcacuaccaauauucuggaagccaaauacuggugucccgacagcauggaguauaacugcccuaauuuguccccaagagaggaaccggaugacauagauuguuggugcuacggcgucgaaaacgugaggguugcuuaugguaagugugacucugcagggcggucgcgcagaucaaggcgggccaucgaucuccccacacaugagaaucacggacugaaaacccgccaagagaaguggaugacuggccgaaugggcgaaagacagcugcagaagauugagaggugguucgugcggaacccuuucuucgcggucacagcucucaccaucgccuacuuaguggggagcaauaugacgcagcguguaguuauugcacugcuuguguuggccgucggaccagcuuauagugcacauugcaucgguauaacugaccgcgauuuuaucgaaggcgugcacgggggaaccuggguguccgccacacuggagcaagacaaaugugucacuguuauggcucccgauaagccuucucuagacauuagccucgagaccguggccaucgauagaccagcggaaguaaggaaagugugcuacaacgcaguccugacacaugugaagauuaaugacaaaugucccuccaccggcgaggcccaccuugcugaagagaacgaaggugacaaugccugcaagcggacguauucagaucgaggguggggaaacggcuguggccuguucgggaagggaaguaucguugcaugcgcuaaauuuacuugcgccaagagcaugucuuuguucgagguggaccagacaaaaauacaguacgucauucgcgcgcagcuccacgugggugccaagcaagagaauuggaacaccgauaucaaaacucugaaguuugacgcauuauccggcucacaggaaguagaguucauuggguacggaaaagcuacacuggaaugucagguucagaccgccguggauuuuggcaacagcuauaucgcugagauggaaacggagaguuggaucgucgacagacaaugggcccaggaucucacccuuccuuggcagucugguuccgggggcguguggagggagaugcaucaccuggucgaauuugagccaccgcaugcagccacaauucggguguuggcucuaggaaaucaagaaggcagccugaagacugcgcucaccggggcaaugcgcguuacaaaggacacuaacgauaauaaccuguacaaacuucacggaggucacgugucgugcagaguaaagcugucugccuugacccucaaaggcacauccuauaagauauguaccgacaaaauguuuuucgucaagaaucccacugauacggggcauggaacagugguuaugcaagugaaggucucaaaaggcgcuccuugcaggaucccagugauuguagccgacgaccugaccgcagccaucaacaaggguauauuagugacuguuaaucccauugcuaguaccaacgaugacgagguccugaucgaagugaauccuccauucggggauagcuacaucauugugggccguggagacucccggcuaacauaucaguggcacaaagagggcucuagcaucgggaagcucuuuacccagacuaugaaaggagucgagcgacuggccguuaugggugauacagcaugggacuucucaagugcgggcggguuuuucacguccgugggaaagggcauucauaccguguuugguagcgcuuuccaggggcuuuuuggcggauugaacuggauaacuaagguaaucaugggcgccguccugauuuggguggggaucaauacaagaaacaugaccaugucuaugucaaugauccucguuggagugauuaugauguuccugagucuuggcgucggugcaugaggacuaguaauaaggaaacuguaugaaugucugugggcaggaagugaagagauccuucuguaaagguuuuuggaauuaugucugcugaauaauaaacuuuuuugaaauaauaaaucugguagaaaaaugagaucuaaaaaaaaaaaaaaaaaaaaaaaaaaaaaaaaaaaaaaaaaaaaaaaaaaaaaaaaaaaaaaaaugcaucccccccccccccccccccccccccccccccaaaggcucuuuucagagccaccagaauu

SEQ ID NO: 1872 - RNA, 2453 nt, Artificial Sequence
  mRNA product Design g-4 comprising derived and/or modified sequence from YFV__NC_002031.1__SSjev(V3)-prME-XX (polyprotein: aa122-788) (opt3)
gggagacuccugucgggcggaaguaggaggaguagaguuuaaaaacaguacucuuuuuccgguucgggacguaguugaagcaacgacaagccggauaaccgcucuugagacaggaagcuuaccaugaacgagggcagcaucauguggcuggccucccucgcuguggucauugcaugcgccggggcgguuacucuggugcguaaaaaccgauggcuacuccugaauguaacgucagaggaucuuggcaagaccuuuaguguggggacaggaaacugcacuaccaauauucuggaagccaaauacuggugucccgacagcauggaguauaacugcccuaauuuguccccaagagaggaaccggaugacauagauuguuggugcuacggcgucgaaaacgugaggguugcuuaugguaagugugacucugcagggcggucgcgcagaucaaggcgggccaucgaucuccccacacaugagaaucacggacugaaaacccgccaagagaaguggaugacuggccgaaugggcgaaagacagcugcagaagauugagaggugguucgugcggaacccuuucuucgcggucacagcucucaccaucgccuacuuaguggggagcaauaugacgcagcguguaguuauugcacugcuuguguuggccgucggaccagcuuauagugcacauugcaucgguauaacugaccgcgauuuuaucgaaggcgugcacgggggaaccuggguguccgccacacuggagcaagacaaaugugucacuguuauggcucccgauaagccuucucuagacauuagccucgagaccguggccaucgauagaccagcggaaguaaggaaagugugcuacaacgcaguccugacacaugugaagauuaaugacaaaugucccuccaccggcgaggcccaccuugcugaagagaacgaaggugacaaugccugcaagcggacguauucagaucgaggguggggaaacggcuguggccuguucgggaagggaaguaucguugcaugcgcuaaauuuacuugcgccaagagcaugucuuuguucgagguggaccagacaaaaauacaguacgucauucgcgcgcagcuccacgugggugccaagcaagagaauuggaacaccgauaucaaaacucugaaguuugacgcauuauccggcucacaggaaguagaguucauuggguacggaaaagcuacacuggaaugucagguucagaccgccguggauuuuggcaacagcuauaucgcugagauggaaacggagaguuggaucgucgacagacaaugggcccaggaucucacccuuccuuggcagucugguuccgggggcguguggagggagaugcaucaccuggucgaauuugagccaccgcaugcagccacaauucggguguuggcucuaggaaaucaagaaggcagccugaagacugcgcucaccggggcaaugcgcguuacaaaggacacuaacgauaauaaccuguacaaacuucacggaggucacgugucgugcagaguaaagcugucugccuugacccucaaaggcacauccuauaagauauguaccgacaaaauguuuuucgucaagaaucccacugauacggggcauggaacagugguuaugcaagugaaggucucaaaaggcgcuccuugcaggaucccagugauuguagccgacgaccugaccgcagccaucaacaaggguauauuagugacuguuaaucccauugcuaguaccaacgaugacgagguccugaucgaagugaauccuccauucggggauagcuacaucauugugggccguggagacucccggcuaacauaucaguggcacaaagagggcucuagcaucgggaagcucuuuacccagacuaugaaaggagucgagcgacuggccguuaugggugauacagcaugggacuucucaagugcgggcggguuuuucacguccgugggaaagggcauucauaccguguuugguagcgcuuuccaggggcuuuuuggcggauugaacuggauaacuaagguaaucaugggcgccguccugauuuggguggggaucaauacaagaaacaugaccaugucuaugucaaugauccucguuggagugauuaugauguuccugagucuuggcgucggugcagaucaggggugugccauaaauuuuggaaaaugaggacuaguaauaaggaaacuguaugaaugucugugggcaggaagugaagagauccuucuguaaagguuuuuggaauuaugucugcugaauaauaaacuuuuuugaaauaauaaaucugguagaaaaaugagaucuaaaaaaaaaaaaaaaaaaaaaaaaaaaaaaaaaaaaaaaaaaaaaaaaaaaaaaaaaaaaaaaaugcaucccccccccccccccccccccccccccccccaaaggcucuuuucagagccaccagaauu

SEQ ID NO: 1873 - RNA, 2462 nt, Artificial Sequence
  mRNA product Design g-4 comprising derived and/or modified sequence from YFV__NC_002031.1__X-SS-prMEdelstem_TM-JEV (polyprotein: aa92-681) (opt4)
gggagacuccugucgggcggaaguaggaggaguagaguuuaaaaacaguacucuuuuuccgguucgggacguaguugaagcaacgacaagccggauaaccgcucuugagacaggaagcuuaccaugagaggccugagcagcagaaagagaagaagccacgacgugcugaccgugcaguuccugauccugggcaugcugcugaugaccggcggcgugacccuggugagaaagaacagauggcugcugcugaacgugaccagcgaggaccugggcaagaccuucagcgugggcaccggcaacugcaccaccaacauccuggaggccaaguacuggugccccgacagcauggaguacaacugccccaaccugagccccagagaggagcccgacgacaucgacugcuggugcuacggcguggagaacgugagaguggccuacggcaagugcgacagcgccggcagaagcagaagaagcagaagagccaucgaccugcccacccacgagaaccacggccugaagaccagacaggagaaguggaugaccggcagaaugggcgagagacagcugcagaagaucgagagaugguucgugagaaaccccuucuucgccgugaccgcccugaccaucgccuaccuggugggcagcaacaugacccagagaguggugaucgcccugcuggugcuggccgugggccccgccuacagcgcccacugcaucggcaucaccgacagagacuucaucgagggcgugcacggcggcaccugggugagcgccacccuggagcaggacaagugcgugaccgugauggcccccgacaagcccagccuggacaucagccuggagaccguggccaucgacagacccgccgaggugagaaaggugugcuacaacgccgugcugacccacgugaagaucaacgacaagugccccagcaccggcgaggcccaccuggccgaggagaacgagggcgacaacgccugcaagagaaccuacagcgacagaggcuggggcaacggcugcggccuguucggcaagggcagcaucguggccugcgccaaguucaccugcgccaagagcaugagccuguucgagguggaccagaccaagauccaguacgugaucagagcccagcugcacgugggcgccaagcaggagaacuggaacaccgacaucaagacccugaaguucgacgcccugagcggcagccaggagguggaguucaucggcuacggcaaggccacccuggagugccaggugcagaccgccguggacuucggcaacagcuacaucgccgagauggagaccgagagcuggaucguggacagacagugggcccaggaccugacccugcccuggcagagcggcagcggcggcguguggagagagaugcaccaccugguggaguucgagcccccccacgccgccaccaucagagugcuggcccugggcaaccaggagggcagccugaagaccgcccugaccggcgccaugagagugaccaaggacaccaacgacaacaaccuguacaagcugcacggcggccacgugagcugcagagugaagcugagcgcccugacccugaagggcaccagcuacaagaucugcaccgacaagauguucuucgugaagaaccccaccgacaccggccacggcaccguggugaugcaggugaaggugagcaagggcgcccccugcagaauccccgugaucguggccgacgaccugaccgccgccaucaacaagggcauccuggugaccgugaaccccaucgccagcaccaacgacgacgaggugcugaucgaggugaacccccccuucggcgacagcuacaucaucgugggcagaggcgacagcagacugaccuaccaguggcacaaggagggcagcagcaucggcagcacccugggcaaggccuucagcaccacccugaagggcgcccagagacuggccgcccugggcgacaccgccugggacuucggcagcaucggcggcguguucaacagcaucggcagagccgugcaccagguguucggcggcgccuucagaacccuguucggcggcaugagcuggaucacccagggccugaugggcgcccugcugcuguggaugggcgugaacgccagagacagaagcaucgcccuggccuuccuggccaccggcggcgugcugguguuccuggccaccaacgugcacgccugaggacuaguaauaaggaaacuguaugaaugucugugggcaggaagugaagagauccuucuguaaagguuuuuggaauuaugucugcugaauaauaaacuuuuuugaaauaauaaaucugguagaaaaaugagaucuaaaaaaaaaaaaaaaaaaaaaaaaaaaaaaaaaaaaaaaaaaaaaaaaaaaaaaaaaaaaaaaaugcaucccccccccccccccccccccccccccccccaaaggcucuuuucagagccaccagaauu

SEQ ID NO: 1874 - RNA, 2435 nt, Artificial Sequence
  mRNA product Design g-4 comprising derived and/or modified sequence from YFV__NC_002031.1__SSjev(V3)-prMEdelstem_TM-JEV (polyprotein: aa122-681) (opt4)
gggagacuccugucgggcggaaguaggaggaguagaguuuaaaaacaguacucuuuuuccgguucgggacguaguugaagcaacgacaagccggauaaccgcucuugagacaggaagcuuaccaugaacgagggcagcaucauguggcuggccagccuggccguggugaucgccugcgccggcgccgugacccuggugagaaagaacagauggcugcugcugaacgugaccagcgaggaccugggcaagaccuucagcgugggcaccggcaacugcaccaccaacauccuggaggccaaguacuggugccccgacagcauggaguacaacugccccaaccugagccccagagaggagcccgacgacaucgacugcuggugcuacggcguggagaacgugagaguggccuacggcaagugcgacagcgccggcagaagcagaagaagcagaagagccaucgaccugcccacccacgagaaccacggccugaagaccagacaggagaaguggaugaccggcagaaugggcgagagacagcugcagaagaucgagagaugguucgugagaaaccccuucuucgccgugaccgcccugaccaucgccuaccuggugggcagcaacaugacccagagaguggugaucgcccugcuggugcuggccgugggccccgccuacagcgcccacugcaucggcaucaccgacagagacuucaucgagggcgugcacggcggcaccugggugagcgccacccuggagcaggacaagugcgugaccgugauggcccccgacaagcccagccuggacaucagccuggagaccguggccaucgacagacccgccgaggugagaaaggugugcuacaacgccgugcugacccacgugaagaucaacgacaagugccccagcaccggcgaggcccaccuggccgaggagaacgagggcgacaacgccugcaagagaaccuacagcgacagaggcuggggcaacggcugcggccuguucggcaagggcagcaucguggccugcgccaaguucaccugcgccaagagcaugagccuguucgagguggaccagaccaagauccaguacgugaucagagcccagcugcacgugggcgccaagcaggagaacuggaacaccgacaucaagacccugaaguucgacgcccugagcggcagccaggagguggaguucaucggcuacggcaaggccacccuggagugccaggugcagaccgccguggacuucggcaacagcuacaucgccgagauggagaccgagagcuggaucguggacagacagugggcccaggaccugacccugcccuggcagagcggcagcggcggcguguggagagagaugcaccaccugguggaguucgagcccccccacgccgccaccaucagagugcuggcccugggcaaccaggagggcagccugaagaccgcccugaccggcgccaugagagugaccaaggacaccaacgacaacaaccuguacaagcugcacggcggccacgugagcugcagagugaagcugagcgcccugacccugaagggcaccagcuacaagaucugcaccgacaagauguucuucgugaagaaccccaccgacaccggccacggcaccguggugaugcaggugaaggugagcaagggcgcccccugcagaauccccgugaucguggccgacgaccugaccgccgccaucaacaagggcauccuggugaccgugaaccccaucgccagcaccaacgacgacgaggugcugaucgaggugaacccccccuucggcgacagcuacaucaucgugggcagaggcgacagcagacugaccuaccaguggcacaaggagggcagcagcaucggcagcacccugggcaaggccuucagcaccacccugaagggcgcccagagacuggccgcccugggcgacaccgccugggacuucggcagcaucggcggcguguucaacagcaucggcagagccgugcaccagguguucggcggcgccuucagaacccuguucggcggcaugagcuggaucacccagggccugaugggcgcccugcugcuguggaugggcgugaacgccagagacagaagcaucgcccuggccuuccuggccaccggcggcgugcugguguuccuggccaccaacgugcacgccugaggacuaguaauaaggaaacuguaugaaugucugugggcaggaagugaagagauccuucuguaaagguuuuuggaauuaugucugcugaauaauaaacuuuuuugaaauaauaaaucugguagaaaaaugagaucuaaaaaaaaaaaaaaaaaaaaaaaaaaaaaaaaaaaaaaaaaaaaaaaaaaaaaaaaaaaaaaaaugcaucccccccccccccccccccccccccccccccaaaggcucuuuucagagccaccagaauu

SEQ ID NO: 1875 - RNA, 2450 nt, Artificial Sequence
  mRNA product Design g-4 comprising derived and/or modified sequence from YFV__NC_002031.1__X-SS-prME (polyprotein: aa92-778) (opt4)
gggagacuccugucgggcggaaguaggaggaguagaguuuaaaaacaguacucuuuuuccgguucgggacguaguugaagcaacgacaagccggauaaccgcucuugagacaggaagcuuaccaugagaggccugagcagcagaaagagaagaagccacgacgugcugaccgugcaguuccugauccugggcaugcugcugaugaccggcggcgugacccuggugagaaagaacagauggcugcugcugaacgugaccagcgaggaccugggcaagaccuucagcgugggcaccggcaacugcaccaccaacauccuggaggccaaguacuggugccccgacagcauggaguacaacugccccaaccugagccccagagaggagcccgacgacaucgacugcuggugcuacggcguggagaacgugagaguggccuacggcaagugcgacagcgccggcagaagcagaagaagcagaagagccaucgaccugcccacccacgagaaccacggccugaagaccagacaggagaaguggaugaccggcagaaugggcgagagacagcugcagaagaucgagagaugguucgugagaaaccccuucuucgccgugaccgcccugaccaucgccuaccuggugggcagcaacaugacccagagaguggugaucgcccugcuggugcuggccgugggccccgccuacagcgcccacugcaucggcaucaccgacagagacuucaucgagggcgugcacggcggcaccugggugagcgccacccuggagcaggacaagugcgugaccgugauggcccccgacaagcccagccuggacaucagccuggagaccguggccaucgacagacccgccgaggugagaaaggugugcuacaacgccgugcugacccacgugaagaucaacgacaagugccccagcaccggcgaggcccaccuggccgaggagaacgagggcgacaacgccugcaagagaaccuacagcgacagaggcuggggcaacggcugcggccuguucggcaagggcagcaucguggccugcgccaaguucaccugcgccaagagcaugagccuguucgagguggaccagaccaagauccaguacgugaucagagcccagcugcacgugggcgccaagcaggagaacuggaacaccgacaucaagacccugaaguucgacgcccugagcggcagccaggagguggaguucaucggcuacggcaaggccacccuggagugccaggugcagaccgccguggacuucggcaacagcuacaucgccgagauggagaccgagagcuggaucguggacagacagugggcccaggaccugacccugcccuggcagagcggcagcggcggcguguggagagagaugcaccaccugguggaguucgagcccccccacgccgccaccaucagagugcuggcccugggcaaccaggagggcagccugaagaccgcccugaccggcgccaugagagugaccaaggacaccaacgacaacaaccuguacaagcugcacggcggccacgugagcugcagagugaagcugagcgcccugacccugaagggcaccagcuacaagaucugcaccgacaagauguucuucgugaagaaccccaccgacaccggccacggcaccguggugaugcaggugaaggugagcaagggcgcccccugcagaauccccgugaucguggccgacgaccugaccgccgccaucaacaagggcauccuggugaccgugaaccccaucgccagcaccaacgacgacgaggugcugaucgaggugaacccccccuucggcgacagcuacaucaucgugggcagaggcgacagcagacugaccuaccaguggcacaaggagggcagcagcaucggcaagcuguucacccagaccaugaagggcguggagagacuggccgugaugggcgacaccgccugggacuucagcagcgccggcggcuucuucaccagcgugggcaagggcauccacaccguguucggcagcgccuuccagggccuguucggcggccugaacuggaucaccaaggugaucaugggcgccgugcugaucugggugggcaucaacaccagaaacaugaccaugagcaugagcaugauccuggugggcgugaucaugauguuccugagccugggcgugggcgccugaggacuaguaauaaggaaacuguaugaaugucugugggcaggaagugaagagauccuucuguaaagguuuuuggaauuaugucugcugaauaauaaacuuuuuugaaauaauaaaucugguagaaaaaugagaucuaaaaaaaaaaaaaaaaaaaaaaaaaaaaaaaaaaaaaaaaaaaaaaaaaaaaaaaaaaaaaaaaugcaucccccccccccccccccccccccccccccccaaaggcucuuuucagagccaccagaauu

SEQ ID NO: 1876 - RNA, 2453 nt, Artificial Sequence
  mRNA product Design g-4 comprising derived and/or modified sequence from YFV__NC_002031.1__SSjev(V3)-prME-XX (polyprotein: aa122-788) (opt4)
gggagacuccugucgggcggaaguaggaggaguagaguuuaaaaacaguacucuuuuuccgguucgggacguaguugaagcaacgacaagccggauaaccgcucuugagacaggaagcuuaccaugaacgagggcagcaucauguggcuggccagccuggccguggugaucgccugcgccggcgccgugacccuggugagaaagaacagauggcugcugcugaacgugaccagcgaggaccugggcaagaccuucagcgugggcaccggcaacugcaccaccaacauccuggaggccaaguacuggugccccgacagcauggaguacaacugccccaaccugagccccagagaggagcccgacgacaucgacugcuggugcuacggcguggagaacgugagaguggccuacggcaagugcgacagcgccggcagaagcagaagaagcagaagagccaucgaccugcccacccacgagaaccacggccugaagaccagacaggagaaguggaugaccggcagaaugggcgagagacagcugcagaagaucgagagaugguucgugagaaaccccuucuucgccgugaccgcccugaccaucgccuaccuggugggcagcaacaugacccagagaguggugaucgcccugcuggugcuggccgugggccccgccuacagcgcccacugcaucggcaucaccgacagagacuucaucgagggcgugcacggcggcaccugggugagcgccacccuggagcaggacaagugcgugaccgugauggcccccgacaagcccagccuggacaucagccuggagaccguggccaucgacagacccgccgaggugagaaaggugugcuacaacgccgugcugacccacgugaagaucaacgacaagugccccagcaccggcgaggcccaccuggccgaggagaacgagggcgacaacgccugcaagagaaccuacagcgacagaggcuggggcaacggcugcggccuguucggcaagggcagcaucguggccugcgccaaguucaccugcgccaagagcaugagccuguucgagguggaccagaccaagauccaguacgugaucagagcccagcugcacgugggcgccaagcaggagaacuggaacaccgacaucaagacccugaaguucgacgcccugagcggcagccaggagguggaguucaucggcuacggcaaggccacccuggagugccaggugcagaccgccguggacuucggcaacagcuacaucgccgagauggagaccgagagcuggaucguggacagacagugggcccaggaccugacccugcccuggcagagcggcagcggcggcguguggagagagaugcaccaccugguggaguucgagcccccccacgccgccaccaucagagugcuggcccugggcaaccaggagggcagccugaagaccgcccugaccggcgccaugagagugaccaaggacaccaacgacaacaaccuguacaagcugcacggcggccacgugagcugcagagugaagcugagcgcccugacccugaagggcaccagcuacaagaucugcaccgacaagauguucuucgugaagaaccccaccgacaccggccacggcaccguggugaugcaggugaaggugagcaagggcgcccccugcagaauccccgugaucguggccgacgaccugaccgccgccaucaacaagggcauccuggugaccgugaaccccaucgccagcaccaacgacgacgaggugcugaucgaggugaacccccccuucggcgacagcuacaucaucgugggcagaggcgacagcagacugaccuaccaguggcacaaggagggcagcagcaucggcaagcuguucacccagaccaugaagggcguggagagacuggccgugaugggcgacaccgccugggacuucagcagcgccggcggcuucuucaccagcgugggcaagggcauccacaccguguucggcagcgccuuccagggccuguucggcggccugaacuggaucaccaaggugaucaugggcgccgugcugaucugggugggcaucaacaccagaaacaugaccaugagcaugagcaugauccuggugggcgugaucaugauguuccugagccugggcgugggcgccgaccagggcugcgccaucaacuucggcaagugaggacuaguaauaaggaaacuguaugaaugucugugggcaggaagugaagagauccuucuguaaagguuuuuggaauuaugucugcugaauaauaaacuuuuuugaaauaauaaaucugguagaaaaaugagaucuaaaaaaaaaaaaaaaaaaaaaaaaaaaaaaaaaaaaaaaaaaaaaaaaaaaaaaaaaaaaaaaaugcaucccccccccccccccccccccccccccccccaaaggcucuuuucagagccaccagaauu

SEQ ID NO: 1877 - RNA, 2462 nt, Artificial Sequence
  mRNA product Design g-4 comprising derived and/or modified sequence from YFV__NC_002031.1__X-SS-prMEdelstem_TM-JEV (polyprotein: aa92-681) (opt5)
gggagacuccugucgggcggaaguaggaggaguagaguuuaaaaacaguacucuuuuuccgguucgggacguaguugaagcaacgacaagccggauaaccgcucuugagacaggaagcuuaccaugagaggccugagcucccggaagcgcagaucucacgacgugcucaccguccaguuccugauccuugggaugcugcucaugacaggaggcguuacgcuggugcggaaaaaccgcuggcuucugcucaaugugaccagcgaggaucuggggaagacauuuuccgucggaaccggcaacugcacaaccaauauucuggaagccaaauacuggugucccgacucuauggaguauaacugcccuaaucucagcccgagagaagaacccgaugacaucgauuguuggugcuacgggguggaaaacguucggguggcuuauggaaagugugacuccgccggccgcucuagacggagccgcagagcgauugaucugccuacacaugagaaucacggccuuaaaacccggcaagagaaguggaugacggggcgcaugggagaaagacagcugcagaagaucgagcggugguucguccgcaaccccuuuuucgcugugaccgcccucacaauugccuaccugguuggcuccaauaugacccagagaguggucaucgcccuucuggugcucgcuguggggccugcuuauagcgcccauugcaucggaauuacagaccgggauuuuaucgaaggcguccacgggggaaccuggguuucugcgacgcuggagcaagacaaaugugugacagugauggcccccgauaagccuucccuggacauuagccucgagaccgucgcuaucgauagaccggccgaagugcgcaaaguuugcuacaacgcugugcugacacaugucaagauuaaugacaaaugucccucuaccggcgaggcccaccuugcggaagagaacgaaggcgacaaugccugcaagcggaccuauuccgauagaggguggggaaacggcugugggcuguucggaaagggcagcaucguggcuugcgccaaauuuacaugcgcuaagucuaugucccucuucgagguugaccagacgaaaauucaguacgugauccgcgcccagcugcacgucggggccaagcaagagaauuggaacaccgauaucaaaacacuuaaguuugacgcucugagcggaucccaggaaguggaguucauuggcuacggcaaagcgacccucgaaugucagguccagacagccguggauuuugggaacucuuauaucgcugagauggaaaccgagagcuggauuguugaccggcaaugggcccaggaucugacgcugccuuggcaguccggaagcggcgggguguggagagagaugcaucaccucgucgaguucgagcccccucaugccgcuacaauccgcgugcuggcccuuggaaaucaagaaggcucucugaagaccgcgcucaccggggcuaugcggguuacaaaggacaccaacgauaauaaccuguacaaacuucacggcggacacguguccugcagagucaagcugagcgcccucacacugaaaggcacgucuuauaagauuuguaccgacaaaauguuuuucgugaagaaucccacagauaccgggcauggaacagugguuaugcaggucaaggugagcaaaggcgccccgugccgcaucccugugaucgucgcugacgaccugaccgccgcuauuaacaaggggauccucgugacgguuaaucccauugccuccaccaacgaugacgaggugcugaucgaagucaauccucccuucggagauucuuacauuaucgugggccggggagacagcagacuuacauaucaguggcacaaagagggcuccagcaucggcagcacccuggggaaggccuucuccacaacgcucaaaggagcucagagacuggccgcgcuuggcgacaccgcuugggauuuugggucuaucggaggcguguucaacagcauugggcgggccguccaccaaguuuuuggaggcgccuuccgcacacuguuuggcgggauguccuggaucacccagggacucaugggcgcucugcuucuguggaugggggugaaugccagagaccggucuauugcucucgccuuccuggcgacaggaggcgugcuggucuuucucgccaccaacgugcaugcuugaggacuaguaauaaggaaacuguaugaaugucugugggcaggaagugaagagauccuucuguaaagguuuuuggaauuaugucugcugaauaauaaacuuuuuugaaauaauaaaucugguagaaaaaugagaucuaaaaaaaaaaaaaaaaaaaaaaaaaaaaaaaaaaaaaaaaaaaaaaaaaaaaaaaaaaaaaaaaugcaucccccccccccccccccccccccccccccccaaaggcucuuuucagagccaccagaauu

SEQ ID NO: 1878 - RNA, 2435 nt, Artificial Sequence
  mRNA product Design g-4 comprising derived and/or modified sequence from YFV__NC_002031.1__SSjev(V3)-prMEdelstem_TM-JEV (polyprotein: aa122-681) (opt5)
gggagacuccugucgggcggaaguaggaggaguagaguuuaaaaacaguacucuuuuuccgguucgggacguaguugaagcaacgacaagccggauaaccgcucuugagacaggaagcuuaccaugaacgagggcagcaucauguggcuggccucccucgcuguggucauugccugcgcgggggcuguuacgcuggugcggaaaaaccgcuggcuucugcucaaugugaccagcgaggaucuggggaagacauuuuccgucggaaccggcaacugcacaaccaauauucuggaagccaaauacuggugucccgacucuauggaguauaacugcccuaaucucagcccgagagaagaacccgaugacaucgauuguuggugcuacgggguggaaaacguucggguggcuuauggaaagugugacuccgccggccgcucuagacggagccgcagagcgauugaucugccuacacaugagaaucacggccuuaaaacccggcaagagaaguggaugacggggcgcaugggagaaagacagcugcagaagaucgagcggugguucguccgcaaccccuuuuucgcugugaccgcccucacaauugccuaccugguuggcuccaauaugacccagagaguggucaucgcccuucuggugcucgcuguggggccugcuuauagcgcccauugcaucggaauuacagaccgggauuuuaucgaaggcguccacgggggaaccuggguuucugcgacgcuggagcaagacaaaugugugacagugauggcccccgauaagccuucccuggacauuagccucgagaccgucgcuaucgauagaccggccgaagugcgcaaaguuugcuacaacgcugugcugacacaugucaagauuaaugacaaaugucccucuaccggcgaggcccaccuugcggaagagaacgaaggcgacaaugccugcaagcggaccuauuccgauagaggguggggaaacggcugugggcuguucggaaagggcagcaucguggcuugcgccaaauuuacaugcgcuaagucuaugucccucuucgagguugaccagacgaaaauucaguacgugauccgcgcccagcugcacgucggggccaagcaagagaauuggaacaccgauaucaaaacacuuaaguuugacgcucugagcggaucccaggaaguggaguucauuggcuacggcaaagcgacccucgaaugucagguccagacagccguggauuuugggaacucuuauaucgcugagauggaaaccgagagcuggauuguugaccggcaaugggcccaggaucugacgcugccuuggcaguccggaagcggcgggguguggagagagaugcaucaccucgucgaguucgagcccccucaugccgcuacaauccgcgugcuggcccuuggaaaucaagaaggcucucugaagaccgcgcucaccggggcuaugcggguuacaaaggacaccaacgauaauaaccuguacaaacuucacggcggacacguguccugcagagucaagcugagcgcccucacacugaaaggcacgucuuauaagauuuguaccgacaaaauguuuuucgugaagaaucccacagauaccgggcauggaacagugguuaugcaggucaaggugagcaaaggcgccccgugccgcaucccugugaucgucgcugacgaccugaccgccgcuauuaacaaggggauccucgugacgguuaaucccauugccuccaccaacgaugacgaggugcugaucgaagucaauccucccuucggagauucuuacauuaucgugggccggggagacagcagacuuacauaucaguggcacaaagagggcuccagcaucggcagcacccuggggaaggccuucuccacaacgcucaaaggagcucagagacuggccgcgcuuggcgacaccgcuugggauuuugggucuaucggaggcguguucaacagcauugggcgggccguccaccaaguuuuuggaggcgccuuccgcacacuguuuggcgggauguccuggaucacccagggacucaugggcgcucugcuucuguggaugggggugaaugccagagaccggucuauugcucucgccuuccuggcgacaggaggcgugcuggucuuucucgccaccaacgugcaugcuugaggacuaguaauaaggaaacuguaugaaugucugugggcaggaagugaagagauccuucuguaaagguuuuuggaauuaugucugcugaauaauaaacuuuuuugaaauaauaaaucugguagaaaaaugagaucuaaaaaaaaaaaaaaaaaaaaaaaaaaaaaaaaaaaaaaaaaaaaaaaaaaaaaaaaaaaaaaaaugcaucccccccccccccccccccccccccccccccaaaggcucuuuucagagccaccagaauu

SEQ ID NO: 1879 - RNA, 2450 nt, Artificial Sequence
  mRNA product Design g-4 comprising derived and/or modified sequence from YFV__NC_002031.1__X-SS-prME (polyprotein: aa92-778) (opt5)
gggagacuccugucgggcggaaguaggaggaguagaguuuaaaaacaguacucuuuuuccgguucgggacguaguugaagcaacgacaagccggauaaccgcucuugagacaggaagcuuaccaugagaggccugagcucccggaagcgcagaucucacgacgugcucaccguccaguuccugauccuugggaugcugcucaugacaggaggcguuacgcuggugcggaaaaaccgcuggcuucugcucaaugugaccagcgaggaucuggggaagacauuuuccgucggaaccggcaacugcacaaccaauauucuggaagccaaauacuggugucccgacucuauggaguauaacugcccuaaucucagcccgagagaagaacccgaugacaucgauuguuggugcuacgggguggaaaacguucggguggcuuauggaaagugugacuccgccggccgcucuagacggagccgcagagcgauugaucugccuacacaugagaaucacggccuuaaaacccggcaagagaaguggaugacggggcgcaugggagaaagacagcugcagaagaucgagcggugguucguccgcaaccccuuuuucgcugugaccgcccucacaauugccuaccugguuggcuccaauaugacccagagaguggucaucgcccuucuggugcucgcuguggggccugcuuauagcgcccauugcaucggaauuacagaccgggauuuuaucgaaggcguccacgggggaaccuggguuucugcgacgcuggagcaagacaaaugugugacagugauggcccccgauaagccuucccuggacauuagccucgagaccgucgcuaucgauagaccggccgaagugcgcaaaguuugcuacaacgcugugcugacacaugucaagauuaaugacaaaugucccucuaccggcgaggcccaccuugcggaagagaacgaaggcgacaaugccugcaagcggaccuauuccgauagaggguggggaaacggcugugggcuguucggaaagggcagcaucguggcuugcgccaaauuuacaugcgcuaagucuaugucccucuucgagguugaccagacgaaaauucaguacgugauccgcgcccagcugcacgucggggccaagcaagagaauuggaacaccgauaucaaaacacuuaaguuugacgcucugagcggaucccaggaaguggaguucauuggcuacggcaaagcgacccucgaaugucagguccagacagccguggauuuugggaacucuuauaucgcugagauggaaaccgagagcuggauuguugaccggcaaugggcccaggaucugacgcugccuuggcaguccggaagcggcgggguguggagagagaugcaucaccucgucgaguucgagcccccucaugccgcuacaauccgcgugcuggcccuuggaaaucaagaaggcucucugaagaccgcgcucaccggggcuaugcggguuacaaaggacaccaacgauaauaaccuguacaaacuucacggcggacacguguccugcagagucaagcugagcgcccucacacugaaaggcacgucuuauaagauuuguaccgacaaaauguuuuucgugaagaaucccacagauaccgggcauggaacagugguuaugcaggucaaggugagcaaaggcgccccgugccgcaucccugugaucgucgcugacgaccugaccgccgcuauuaacaaggggauccucgugacgguuaaucccauugccuccaccaacgaugacgaggugcugaucgaagucaauccucccuucggagauucuuacauuaucgugggccggggagacagcagacuuacauaucaguggcacaaagagggcuccagcaucggaaagcuguuuacccagacaaugaaaggcguugagcgccucgcggugaugggggauaccgccugggacuucucuuccgcuggaggcuuuuucacgagcgucgggaaggggauucauacaguguuuggcucugccuuccaagggcuguuuggcggacugaacuggaucaccaagguuauuaugggcgcugugcuuaucugggucgggauuaauacacggaacaugaccauguccaugagcaugauccucgugggagugauuaugauguuccugucccugggcgucggggccugaggacuaguaauaaggaaacuguaugaaugucugugggcaggaagugaagagauccuucuguaaagguuuuuggaauuaugucugcugaauaauaaacuuuuuugaaauaauaaaucugguagaaaaaugagaucuaaaaaaaaaaaaaaaaaaaaaaaaaaaaaaaaaaaaaaaaaaaaaaaaaaaaaaaaaaaaaaaaugcaucccccccccccccccccccccccccccccccaaaggcucuuuucagagccaccagaauu

SEQ ID NO: 1880 - RNA, 2453 nt, Artificial Sequence
  mRNA product Design g-4 comprising derived and/or modified sequence from YFV__NC_002031.1__SSjev(V3)-prME-XX (polyprotein: aa122-788) (opt5)
gggagacuccugucgggcggaaguaggaggaguagaguuuaaaaacaguacucuuuuuccgguucgggacguaguugaagcaacgacaagccggauaaccgcucuugagacaggaagcuuaccaugaacgagggcagcaucauguggcuggccucccucgcuguggucauugccugcgcgggggcuguuacgcuggugcggaaaaaccgcuggcuucugcucaaugugaccagcgaggaucuggggaagacauuuuccgucggaaccggcaacugcacaaccaauauucuggaagccaaauacuggugucccgacucuauggaguauaacugcccuaaucucagcccgagagaagaacccgaugacaucgauuguuggugcuacgggguggaaaacguucggguggcuuauggaaagugugacuccgccggccgcucuagacggagccgcagagcgauugaucugccuacacaugagaaucacggccuuaaaacccggcaagagaaguggaugacggggcgcaugggagaaagacagcugcagaagaucgagcggugguucguccgcaaccccuuuuucgcugugaccgcccucacaauugccuaccugguuggcuccaauaugacccagagaguggucaucgcccuucuggugcucgcuguggggccugcuuauagcgcccauugcaucggaauuacagaccgggauuuuaucgaaggcguccacgggggaaccuggguuucugcgacgcuggagcaagacaaaugugugacagugauggcccccgauaagccuucccuggacauuagccucgagaccgucgcuaucgauagaccggccgaagugcgcaaaguuugcuacaacgcugugcugacacaugucaagauuaaugacaaaugucccucuaccggcgaggcccaccuugcggaagagaacgaaggcgacaaugccugcaagcggaccuauuccgauagaggguggggaaacggcugugggcuguucggaaagggcagcaucguggcuugcgccaaauuuacaugcgcuaagucuaugucccucuucgagguugaccagacgaaaauucaguacgugauccgcgcccagcugcacgucggggccaagcaagagaauuggaacaccgauaucaaaacacuuaaguuugacgcucugagcggaucccaggaaguggaguucauuggcuacggcaaagcgacccucgaaugucagguccagacagccguggauuuugggaacucuuauaucgcugagauggaaaccgagagcuggauuguugaccggcaaugggcccaggaucugacgcugccuuggcaguccggaagcggcgggguguggagagagaugcaucaccucgucgaguucgagcccccucaugccgcuacaauccgcgugcuggcccuuggaaaucaagaaggcucucugaagaccgcgcucaccggggcuaugcggguuacaaaggacaccaacgauaauaaccuguacaaacuucacggcggacacguguccugcagagucaagcugagcgcccucacacugaaaggcacgucuuauaagauuuguaccgacaaaauguuuuucgugaagaaucccacagauaccgggcauggaacagugguuaugcaggucaaggugagcaaaggcgccccgugccgcaucccugugaucgucgcugacgaccugaccgccgcuauuaacaaggggauccucgugacgguuaaucccauugccuccaccaacgaugacgaggugcugaucgaagucaauccucccuucggagauucuuacauuaucgugggccggggagacagcagacuuacauaucaguggcacaaagagggcuccagcaucggaaagcuguuuacccagacaaugaaaggcguugagcgccucgcggugaugggggauaccgccugggacuucucuuccgcuggaggcuuuuucacgagcgucgggaaggggauucauacaguguuuggcucugccuuccaagggcuguuuggcggacugaacuggaucaccaagguuauuaugggcgcugugcuuaucugggucgggauuaauacacggaacaugaccauguccaugagcaugauccucgugggagugauuaugauguuccugucccugggcgucggggccgaucagggaugugcgaucaauuuuggcaaaugaggacuaguaauaaggaaacuguaugaaugucugugggcaggaagugaagagauccuucuguaaagguuuuuggaauuaugucugcugaauaauaaacuuuuuugaaauaauaaaucugguagaaaaaugagaucuaaaaaaaaaaaaaaaaaaaaaaaaaaaaaaaaaaaaaaaaaaaaaaaaaaaaaaaaaaaaaaaaugcaucccccccccccccccccccccccccccccccaaaggcucuuuucagagccaccagaauu

SEQ ID NO: 1881 - RNA, 2462 nt, Artificial Sequence
  mRNA product Design g-4 comprising derived and/or modified sequence from YFV__NC_002031.1__X-SS-prMEdelstem_TM-JEV (polyprotein: aa92-681) (opt6)
gggagacuccugucgggcggaaguaggaggaguagaguuuaaaaacaguacucuuuuuccgguucgggacguaguugaagcaacgacaagccggauaaccgcucuugagacaggaagcuuaccaugagaggauuaucaaguagaaaaagaagaucacaugauguacuaaccgugcaauuuuugaucuuagggaugcucuuaaugacaggagguguuacauuaguaagaaagaaucgauggcugcuuuuaaaugugacaucagaggauuuagggaaaacauuuucgguaggaacaggaaauuguacuacaaauauacuugaagcaaaauauuggugcccagacucuauggaauauaauuguccaaauuuaaguccuagagaagaaccugacgauauagauuguugguguuaugguguagaaaauguaagaguagcauacggcaaaugcgauagugcaggacguucuagacguucaaggagagccauagaucugcccacucacgaaaaucacggauugaaaacacgacaagaaaaauggaugacugggcgaaugggagaaagacaacuacagaaaauugaaagaugguucguuagaaauccauucuuugccguaacagcuuuaacaauagccuauuuaguagguaguaauaugacacaaagaguaguaauagcauugcuaguguuagcaguuggaccagcuuauagugcacauugcauaggaauaacagauagagacuuuauagaaggaguacacgggggaacuuggguaagugccacuuuagaacaagauaaauguguuacagugauggcgccagauaaaccaagucuggacauaaguuuggaaacaguagcgauugauagacccgcagaaguaagaaaaguuuguuauaaugcuguucuaacccauguuaaaauaaaugauaaaugcccuagcaccggagaagcccaucuagcagaagaaaaugaaggagauaacgcauguaaacgaacauacucagauagaggauggggcaacggauguggcuuguuuggaaaagguagcauaguagcaugcgcuaaauuuacaugcgcaaagucaaugucauuauuugaaguagaucaaacaaaaauacaauauguaauaagagcucaauuacacgugggugcaaaacaagaaaauuggaauacagacauaaagacacuaaaguucgacgcauuaaguggaucacaagagguagaauuuauaggguacggaaaagcgacuuuagagugucaaguccaaacagcaguagauuucgguaacucauacauagcagaaauggaaacugaaaguuggauaguagauagacaaugggcacaagacuugacacuaccuuggcaaucaggaagcggaggaguauggagagaaaugcaucauuuaguagaauuugaaccaccucaugcagcaacaauaagaguauuagcccuaggaaaccaagaaggaaguuuaaaaacagcacuaacaggagcuaugagaguaacaaaagauacaaaugacaacaaucuauacaaauuacacggaggacauguaagcugccggguaaaguugagcgcacuaacauuaaaaggaacgaguuauaaaauaugcacagauaaaauguucuuuguuaaaaauccuacagauaccggucauggaacaguaguaaugcaaguaaaaguaaguaaaggcgcucccuguagaauaccuguaauagucgcagacgauuuaaccgcagcaauaaauaaaggaauauuagucacgguaaacccaauagcgucaacaaaugaugaugaaguauuaauagaaguuaacccaccuuuuggagacaguuauauaauagucggaaggggugauaguagacuaacauaccaauggcauaaagaaggaagcucaauaggaaguacacuaggaaaagcauuuaguacaacauuaaaaggagcacaaagauuagcagcauuaggagauacagcaugggauuuuggaagcauaggaggaguauuuaauaguauagguagagcaguacaucaaguauuuggaggagcauuuagaacauuauuuggaggaaugaguuggauaacacaaggauuaaugggagcauuauuauuauggaugggaguaaaugcaagagauagaaguauagcauuagcauuuuuagcaacaggaggaguauuaguauuuuuagcaacaaauguacaugcaugaggacuaguaauaaggaaacuguaugaaugucugugggcaggaagugaagagauccuucuguaaagguuuuuggaauuaugucugcugaauaauaaacuuuuuugaaauaauaaaucugguagaaaaaugagaucuaaaaaaaaaaaaaaaaaaaaaaaaaaaaaaaaaaaaaaaaaaaaaaaaaaaaaaaaaaaaaaaaugcaucccccccccccccccccccccccccccccccaaaggcucuuuucagagccaccagaauu

SEQ ID NO: 1882 - RNA, 2435 nt, Artificial Sequence
  mRNA product Design g-4 comprising derived and/or modified sequence from YFV__NC_002031.1__SSjev(V3)-prMEdelstem_TM-JEV (polyprotein: aa122-681) (opt6)
gggagacuccugucgggcggaaguaggaggaguagaguuuaaaaacaguacucuuuuuccgguucgggacguaguugaagcaacgacaagccggauaaccgcucuugagacaggaagcuuaccaugaaugaagguucaauuaugugguuggcaucauuagcaguuguaauugcaugugcuggugcaguuacauuaguaagaaagaaucgauggcugcuuuuaaaugugacaucagaggauuuagggaaaacauuuucgguaggaacaggaaauuguacuacaaauauacuugaagcaaaauauuggugcccagacucuauggaauauaauuguccaaauuuaaguccuagagaagaaccugacgauauagauuguugguguuaugguguagaaaauguaagaguagcauacggcaaaugcgauagugcaggacguucuagacguucaaggagagccauagaucugcccacucacgaaaaucacggauugaaaacacgacaagaaaaauggaugacugggcgaaugggagaaagacaacuacagaaaauugaaagaugguucguuagaaauccauucuuugccguaacagcuuuaacaauagccuauuuaguagguaguaauaugacacaaagaguaguaauagcauugcuaguguuagcaguuggaccagcuuauagugcacauugcauaggaauaacagauagagacuuuauagaaggaguacacgggggaacuuggguaagugccacuuuagaacaagauaaauguguuacagugauggcgccagauaaaccaagucuggacauaaguuuggaaacaguagcgauugauagacccgcagaaguaagaaaaguuuguuauaaugcuguucuaacccauguuaaaauaaaugauaaaugcccuagcaccggagaagcccaucuagcagaagaaaaugaaggagauaacgcauguaaacgaacauacucagauagaggauggggcaacggauguggcuuguuuggaaaagguagcauaguagcaugcgcuaaauuuacaugcgcaaagucaaugucauuauuugaaguagaucaaacaaaaauacaauauguaauaagagcucaauuacacgugggugcaaaacaagaaaauuggaauacagacauaaagacacuaaaguucgacgcauuaaguggaucacaagagguagaauuuauaggguacggaaaagcgacuuuagagugucaaguccaaacagcaguagauuucgguaacucauacauagcagaaauggaaacugaaaguuggauaguagauagacaaugggcacaagacuugacacuaccuuggcaaucaggaagcggaggaguauggagagaaaugcaucauuuaguagaauuugaaccaccucaugcagcaacaauaagaguauuagcccuaggaaaccaagaaggaaguuuaaaaacagcacuaacaggagcuaugagaguaacaaaagauacaaaugacaacaaucuauacaaauuacacggaggacauguaagcugccggguaaaguugagcgcacuaacauuaaaaggaacgaguuauaaaauaugcacagauaaaauguucuuuguuaaaaauccuacagauaccggucauggaacaguaguaaugcaaguaaaaguaaguaaaggcgcucccuguagaauaccuguaauagucgcagacgauuuaaccgcagcaauaaauaaaggaauauuagucacgguaaacccaauagcgucaacaaaugaugaugaaguauuaauagaaguuaacccaccuuuuggagacaguuauauaauagucggaaggggugauaguagacuaacauaccaauggcauaaagaaggaagcucaauaggaaguacacuaggaaaagcauuuaguacaacauuaaaaggagcacaaagauuagcagcauuaggagauacagcaugggauuuuggaagcauaggaggaguauuuaauaguauagguagagcaguacaucaaguauuuggaggagcauuuagaacauuauuuggaggaaugaguuggauaacacaaggauuaaugggagcauuauuauuauggaugggaguaaaugcaagagauagaaguauagcauuagcauuuuuagcaacaggaggaguauuaguauuuuuagcaacaaauguacaugcaugaggacuaguaauaaggaaacuguaugaaugucugugggcaggaagugaagagauccuucuguaaagguuuuuggaauuaugucugcugaauaauaaacuuuuuugaaauaauaaaucugguagaaaaaugagaucuaaaaaaaaaaaaaaaaaaaaaaaaaaaaaaaaaaaaaaaaaaaaaaaaaaaaaaaaaaaaaaaaugcaucccccccccccccccccccccccccccccccaaaggcucuuuucagagccaccagaauu

SEQ ID NO: 1883 - RNA, 2450 nt, Artificial Sequence
  mRNA product Design g-4 comprising derived and/or modified sequence from YFV__NC_002031.1__X-SS-prME (polyprotein: aa92-778) (opt6)
gggagacuccugucgggcggaaguaggaggaguagaguuuaaaaacaguacucuuuuuccgguucgggacguaguugaagcaacgacaagccggauaaccgcucuugagacaggaagcuuaccaugagaggauuaucaaguagaaaaagaagaucacaugauguacuaaccgugcaauuuuugaucuuagggaugcucuuaaugacaggagguguuacauuaguaagaaagaaucgauggcugcuuuuaaaugugacaucagaggauuuagggaaaacauuuucgguaggaacaggaaauuguacuacaaauauacuugaagcaaaauauuggugcccagacucuauggaauauaauuguccaaauuuaaguccuagagaagaaccugacgauauagauuguugguguuaugguguagaaaauguaagaguagcauacggcaaaugcgauagugcaggacguucuagacguucaaggagagccauagaucugcccacucacgaaaaucacggauugaaaacacgacaagaaaaauggaugacugggcgaaugggagaaagacaacuacagaaaauugaaagaugguucguuagaaauccauucuuugccguaacagcuuuaacaauagccuauuuaguagguaguaauaugacacaaagaguaguaauagcauugcuaguguuagcaguuggaccagcuuauagugcacauugcauaggaauaacagauagagacuuuauagaaggaguacacgggggaacuuggguaagugccacuuuagaacaagauaaauguguuacagugauggcgccagauaaaccaagucuggacauaaguuuggaaacaguagcgauugauagacccgcagaaguaagaaaaguuuguuauaaugcuguucuaacccauguuaaaauaaaugauaaaugcccuagcaccggagaagcccaucuagcagaagaaaaugaaggagauaacgcauguaaacgaacauacucagauagaggauggggcaacggauguggcuuguuuggaaaagguagcauaguagcaugcgcuaaauuuacaugcgcaaagucaaugucauuauuugaaguagaucaaacaaaaauacaauauguaauaagagcucaauuacacgugggugcaaaacaagaaaauuggaauacagacauaaagacacuaaaguucgacgcauuaaguggaucacaagagguagaauuuauaggguacggaaaagcgacuuuagagugucaaguccaaacagcaguagauuucgguaacucauacauagcagaaauggaaacugaaaguuggauaguagauagacaaugggcacaagacuugacacuaccuuggcaaucaggaagcggaggaguauggagagaaaugcaucauuuaguagaauuugaaccaccucaugcagcaacaauaagaguauuagcccuaggaaaccaagaaggaaguuuaaaaacagcacuaacaggagcuaugagaguaacaaaagauacaaaugacaacaaucuauacaaauuacacggaggacauguaagcugccggguaaaguugagcgcacuaacauuaaaaggaacgaguuauaaaauaugcacagauaaaauguucuuuguuaaaaauccuacagauaccggucauggaacaguaguaaugcaaguaaaaguaaguaaaggcgcucccuguagaauaccuguaauagucgcagacgauuuaaccgcagcaauaaauaaaggaauauuagucacgguaaacccaauagcgucaacaaaugaugaugaaguauuaauagaaguuaacccaccuuuuggagacaguuauauaauagucggaaggggugauaguagacuaacauaccaauggcauaaagaaggaagcucaauaggaaaauuauuuacucaaaccaugaaagguguagaaaggcuagcuguuaugggugacacagcaugggauuuuucaagcgcaggaggguucuuuacaucaguagguaaaggaauacauacaguauuuggaagugcauuucaaggauuauuuggugguuuaaauuggauaacaaaaguaauaaugggcgcaguuuuaauauggguagguauaaacacaagaaauaugacaaugucuaugaguaugauauuggucggaguaauaaugauguuuuuaucacuaggagugggugcaugaggacuaguaauaaggaaacuguaugaaugucugugggcaggaagugaagagauccuucuguaaagguuuuuggaauuaugucugcugaauaauaaacuuuuuugaaauaauaaaucugguagaaaaaugagaucuaaaaaaaaaaaaaaaaaaaaaaaaaaaaaaaaaaaaaaaaaaaaaaaaaaaaaaaaaaaaaaaaugcaucccccccccccccccccccccccccccccccaaaggcucuuuucagagccaccagaauu

SEQ ID NO: 1884 - RNA, 2453 nt, Artificial Sequence
  mRNA product Design g-4 comprising derived and/or modified sequence from YFV__NC_002031.1__SSjev(V3)-prME-XX (polyprotein: aa122-788) (opt6)
gggagacuccugucgggcggaaguaggaggaguagaguuuaaaaacaguacucuuuuuccgguucgggacguaguugaagcaacgacaagccggauaaccgcucuugagacaggaagcuuaccaugaaugaagguucaauuaugugguuggcaucauuagcaguuguaauugcaugugcuggugcaguuacauuaguaagaaagaaucgauggcugcuuuuaaaugugacaucagaggauuuagggaaaacauuuucgguaggaacaggaaauuguacuacaaauauacuugaagcaaaauauuggugcccagacucuauggaauauaauuguccaaauuuaaguccuagagaagaaccugacgauauagauuguugguguuaugguguagaaaauguaagaguagcauacggcaaaugcgauagugcaggacguucuagacguucaaggagagccauagaucugcccacucacgaaaaucacggauugaaaacacgacaagaaaaauggaugacugggcgaaugggagaaagacaacuacagaaaauugaaagaugguucguuagaaauccauucuuugccguaacagcuuuaacaauagccuauuuaguagguaguaauaugacacaaagaguaguaauagcauugcuaguguuagcaguuggaccagcuuauagugcacauugcauaggaauaacagauagagacuuuauagaaggaguacacgggggaacuuggguaagugccacuuuagaacaagauaaauguguuacagugauggcgccagauaaaccaagucuggacauaaguuuggaaacaguagcgauugauagacccgcagaaguaagaaaaguuuguuauaaugcuguucuaacccauguuaaaauaaaugauaaaugcccuagcaccggagaagcccaucuagcagaagaaaaugaaggagauaacgcauguaaacgaacauacucagauagaggauggggcaacggauguggcuuguuuggaaaagguagcauaguagcaugcgcuaaauuuacaugcgcaaagucaaugucauuauuugaaguagaucaaacaaaaauacaauauguaauaagagcucaauuacacgugggugcaaaacaagaaaauuggaauacagacauaaagacacuaaaguucgacgcauuaaguggaucacaagagguagaauuuauaggguacggaaaagcgacuuuagagugucaaguccaaacagcaguagauuucgguaacucauacauagcagaaauggaaacugaaaguuggauaguagauagacaaugggcacaagacuugacacuaccuuggcaaucaggaagcggaggaguauggagagaaaugcaucauuuaguagaauuugaaccaccucaugcagcaacaauaagaguauuagcccuaggaaaccaagaaggaaguuuaaaaacagcacuaacaggagcuaugagaguaacaaaagauacaaaugacaacaaucuauacaaauuacacggaggacauguaagcugccggguaaaguugagcgcacuaacauuaaaaggaacgaguuauaaaauaugcacagauaaaauguucuuuguuaaaaauccuacagauaccggucauggaacaguaguaaugcaaguaaaaguaaguaaaggcgcucccuguagaauaccuguaauagucgcagacgauuuaaccgcagcaauaaauaaaggaauauuagucacgguaaacccaauagcgucaacaaaugaugaugaaguauuaauagaaguuaacccaccuuuuggagacaguuauauaauagucggaaggggugauaguagacuaacauaccaauggcauaaagaaggaagcucaauaggaaaauuauuuacucaaaccaugaaagguguagaaaggcuagcuguuaugggugacacagcaugggauuuuucaagcgcaggaggguucuuuacaucaguagguaaaggaauacauacaguauuuggaagugcauuucaaggauuauuuggugguuuaaauuggauaacaaaaguaauaaugggcgcaguuuuaauauggguagguauaaacacaagaaauaugacaaugucuaugaguaugauauuggucggaguaauaaugauguuuuuaucacuaggagugggugcagaucaagguugcgcuauuaauuuuggaaaaugaggacuaguaauaaggaaacuguaugaaugucugugggcaggaagugaagagauccuucuguaaagguuuuuggaauuaugucugcugaauaauaaacuuuuuugaaauaauaaaucugguagaaaaaugagaucuaaaaaaaaaaaaaaaaaaaaaaaaaaaaaaaaaaaaaaaaaaaaaaaaaaaaaaaaaaaaaaaaugcaucccccccccccccccccccccccccccccccaaaggcucuuuucagagccaccagaauu

SEQ ID NO: 1885 - RNA, 2462 nt, Artificial Sequence
  mRNA product Design g-4 comprising derived and/or modified sequence from YFV__NC_002031.1__X-SS-prMEdelstem_TM-JEV (polyprotein: aa92-681) (opt11)
gggagacuccugucgggcggaaguaggaggaguagaguuuaaaaacaguacucuuuuuccgguucgggacguaguugaagcaacgacaagccggauaaccgcucuugagacaggaagcuuaccaugcggggacuaagcagcagaaaaagacgcagccacgaugugcucaccgugcaauuccucauacuggggaugcuccuaaugaccggaggcgugacccuaguaaggaaaaacagauggcuacuacuaaacguaaccucagaagaucuaggaaagacauuuucagucggcacaggcaacugcacaaccaacauacuagaagcaaaauauuggugcccagacagcauggaauacaacugucccaaccucagcccaagagaggaaccagacgacauagacugcugguguuacggaguagaaaacguaagaguggcauacggcaaaugcgacagcgcaggcaggagccgaagaucccgcagagccaucgacuugcccacgcacgaaaaccacggccucaaaacacgacaagaaaaauggaugacagggcgaaugggagaacgacagcuccagaaaauagaacgaugguucguccggaacccguucuucgcaguaacggcacuaacaaucgcauaccucguaggcagcaacaugacacaaagaguggucaucgcgcuacucguacuagcaguggggcccgcauacagugcacacugcauaggaaucacagaccgugacuucaucgaaggcguacacggaggaacguggguaagcgcgacacuggaacaagacaaaugcgugacaguaauggcaccagacaaaccaagccuagacauaucccuagaaacggucgccaucgaccgucccgcagaaguacgaaagguaugcuauaaugcaguccucacacacgucaaaauaaacgacaaaugccccagcacgggcgaagcacaccucgccgaagaaaacgaaggggauaacgcgugcaaacgcaccuacuccgacaggggauggggcaacggaugcggacuguucggaaaaggauccauagucgcaugcgcaaaauuuaccugcgcaaaaagcaugagcuuguucgagguagaccaaacgaagauccaauacguaauccgagcucaacuacacguuggggccaagcaagagaacuggaauacggacaucaaaacacuaaaauucgacgcacucuccggcucacaagaagucgaguucaucggcuacggcaaagcaacacuagaaugccaaguacaaacagcgguggacuucggcaacagcuacauagcagaaauggaaacagaaagcuggauaguagaccgacaaugggcacaagaccuaacucugccauggcaaagcggcucaggaggaguguggagagagaugcaccaccugguagaguucgaacccccacacgcagcaacaauaaggguacuggcacuaggcaaccaagaaggcagccuaaaaaccgcacucacaggagccaugcgcgugacgaaggacaccaacgacaacaaccucuacaaacuccacggagggcacguauccugccgcguaaaacuaucagcacuaacgcuaaaaggaacaagcuacaaaauaugcacagacaaaauguucuucgucaaaaaccccacagacacaggccacggcacagucguaaugcaagugaaggucagcaagggggcccccugccgaaucccagucauaguggcagacgaccucacggccgccaucaacaaagggauccugguaacagugaacccaauagcaucgaccaacgacgacgaaguccucauagaagugaaucccccguucggcgacagcuacaucaucguaggacgcggcgacucccgacugacguaccaauggcauaaagaaggcagcagcauugggagcacgcucgggaaagcguucucgaccacgcucaagggcgcgcaaaggcucgcggccuugggcgauaccgcgugggauuucgggagcauaggcggggucuuuaacucgaucgggcgcgcgguccaucaaguguucgggggcgcguucaggaccuuguucgggggcaugagcuggaucacgcaagggcucaugggcgcgcucuugcucuggaugggggucaaugccagggacaggagcauagccuuggccuuucucgcgaccgggggcgugcucguguucuuggccacgaacgugcacgcgugaggacuaguaauaaggaaacuguaugaaugucugugggcaggaagugaagagauccuucuguaaagguuuuuggaauuaugucugcugaauaauaaacuuuuuugaaauaauaaaucugguagaaaaaugagaucuaaaaaaaaaaaaaaaaaaaaaaaaaaaaaaaaaaaaaaaaaaaaaaaaaaaaaaaaaaaaaaaaugcaucccccccccccccccccccccccccccccccaaaggcucuuuucagagccaccagaauu

SEQ ID NO: 1886 - RNA, 2435 nt, Artificial Sequence
  mRNA product Design g-4 comprising derived and/or modified sequence from YFV__NC_002031.1__SSjev(V3)-prMEdelstem_TM-JEV (polyprotein: aa122-681) (opt11)
gggagacuccugucgggcggaaguaggaggaguagaguuuaaaaacaguacucuuuuuccgguucgggacguaguugaagcaacgacaagccggauaaccgcucuugagacaggaagcuuaccaugaacgagggcucgaucaugugguuggccucgcucgcggucgugaucgcgugcgcgggcgcggugacccuaguaaggaaaaacagauggcuacuacuaaacguaaccucagaagaucuaggaaagacauuuucagucggcacaggcaacugcacaaccaacauacuagaagcaaaauauuggugcccagacagcauggaauacaacugucccaaccucagcccaagagaggaaccagacgacauagacugcugguguuacggaguagaaaacguaagaguggcauacggcaaaugcgacagcgcaggcaggagccgaagaucccgcagagccaucgacuugcccacgcacgaaaaccacggccucaaaacacgacaagaaaaauggaugacagggcgaaugggagaacgacagcuccagaaaauagaacgaugguucguccggaacccguucuucgcaguaacggcacuaacaaucgcauaccucguaggcagcaacaugacacaaagaguggucaucgcgcuacucguacuagcaguggggcccgcauacagugcacacugcauaggaaucacagaccgugacuucaucgaaggcguacacggaggaacguggguaagcgcgacacuggaacaagacaaaugcgugacaguaauggcaccagacaaaccaagccuagacauaucccuagaaacggucgccaucgaccgucccgcagaaguacgaaagguaugcuauaaugcaguccucacacacgucaaaauaaacgacaaaugccccagcacgggcgaagcacaccucgccgaagaaaacgaaggggauaacgcgugcaaacgcaccuacuccgacaggggauggggcaacggaugcggacuguucggaaaaggauccauagucgcaugcgcaaaauuuaccugcgcaaaaagcaugagcuuguucgagguagaccaaacgaagauccaauacguaauccgagcucaacuacacguuggggccaagcaagagaacuggaauacggacaucaaaacacuaaaauucgacgcacucuccggcucacaagaagucgaguucaucggcuacggcaaagcaacacuagaaugccaaguacaaacagcgguggacuucggcaacagcuacauagcagaaauggaaacagaaagcuggauaguagaccgacaaugggcacaagaccuaacucugccauggcaaagcggcucaggaggaguguggagagagaugcaccaccugguagaguucgaacccccacacgcagcaacaauaaggguacuggcacuaggcaaccaagaaggcagccuaaaaaccgcacucacaggagccaugcgcgugacgaaggacaccaacgacaacaaccucuacaaacuccacggagggcacguauccugccgcguaaaacuaucagcacuaacgcuaaaaggaacaagcuacaaaauaugcacagacaaaauguucuucgucaaaaaccccacagacacaggccacggcacagucguaaugcaagugaaggucagcaagggggcccccugccgaaucccagucauaguggcagacgaccucacggccgccaucaacaaagggauccugguaacagugaacccaauagcaucgaccaacgacgacgaaguccucauagaagugaaucccccguucggcgacagcuacaucaucguaggacgcggcgacucccgacugacguaccaauggcauaaagaaggcagcagcauugggagcacgcucgggaaagcguucucgaccacgcucaagggcgcgcaaaggcucgcggccuugggcgauaccgcgugggauuucgggagcauaggcggggucuuuaacucgaucgggcgcgcgguccaucaaguguucgggggcgcguucaggaccuuguucgggggcaugagcuggaucacgcaagggcucaugggcgcgcucuugcucuggaugggggucaaugccagggacaggagcauagccuuggccuuucucgcgaccgggggcgugcucguguucuuggccacgaacgugcacgcgugaggacuaguaauaaggaaacuguaugaaugucugugggcaggaagugaagagauccuucuguaaagguuuuuggaauuaugucugcugaauaauaaacuuuuuugaaauaauaaaucugguagaaaaaugagaucuaaaaaaaaaaaaaaaaaaaaaaaaaaaaaaaaaaaaaaaaaaaaaaaaaaaaaaaaaaaaaaaaugcaucccccccccccccccccccccccccccccccaaaggcucuuuucagagccaccagaauu

SEQ ID NO: 1887 - RNA, 2450 nt, Artificial Sequence
  mRNA product Design g-4 comprising derived and/or modified sequence from YFV__NC_002031.1__X-SS-prME (polyprotein: aa92-778) (opt11)
gggagacuccugucgggcggaaguaggaggaguagaguuuaaaaacaguacucuuuuuccgguucgggacguaguugaagcaacgacaagccggauaaccgcucuugagacaggaagcuuaccaugcggggacuaagcagcagaaaaagacgcagccacgaugugcucaccgugcaauuccucauacuggggaugcuccuaaugaccggaggcgugacccuaguaaggaaaaacagauggcuacuacuaaacguaaccucagaagaucuaggaaagacauuuucagucggcacaggcaacugcacaaccaacauacuagaagcaaaauauuggugcccagacagcauggaauacaacugucccaaccucagcccaagagaggaaccagacgacauagacugcugguguuacggaguagaaaacguaagaguggcauacggcaaaugcgacagcgcaggcaggagccgaagaucccgcagagccaucgacuugcccacgcacgaaaaccacggccucaaaacacgacaagaaaaauggaugacagggcgaaugggagaacgacagcuccagaaaauagaacgaugguucguccggaacccguucuucgcaguaacggcacuaacaaucgcauaccucguaggcagcaacaugacacaaagaguggucaucgcgcuacucguacuagcaguggggcccgcauacagugcacacugcauaggaaucacagaccgugacuucaucgaaggcguacacggaggaacguggguaagcgcgacacuggaacaagacaaaugcgugacaguaauggcaccagacaaaccaagccuagacauaucccuagaaacggucgccaucgaccgucccgcagaaguacgaaagguaugcuauaaugcaguccucacacacgucaaaauaaacgacaaaugccccagcacgggcgaagcacaccucgccgaagaaaacgaaggggauaacgcgugcaaacgcaccuacuccgacaggggauggggcaacggaugcggacuguucggaaaaggauccauagucgcaugcgcaaaauuuaccugcgcaaaaagcaugagcuuguucgagguagaccaaacgaagauccaauacguaauccgagcucaacuacacguuggggccaagcaagagaacuggaauacggacaucaaaacacuaaaauucgacgcacucuccggcucacaagaagucgaguucaucggcuacggcaaagcaacacuagaaugccaaguacaaacagcgguggacuucggcaacagcuacauagcagaaauggaaacagaaagcuggauaguagaccgacaaugggcacaagaccuaacucugccauggcaaagcggcucaggaggaguguggagagagaugcaccaccugguagaguucgaacccccacacgcagcaacaauaaggguacuggcacuaggcaaccaagaaggcagccuaaaaaccgcacucacaggagccaugcgcgugacgaaggacaccaacgacaacaaccucuacaaacuccacggagggcacguauccugccgcguaaaacuaucagcacuaacgcuaaaaggaacaagcuacaaaauaugcacagacaaaauguucuucgucaaaaaccccacagacacaggccacggcacagucguaaugcaagugaaggucagcaagggggcccccugccgaaucccagucauaguggcagacgaccucacggccgccaucaacaaagggauccugguaacagugaacccaauagcaucgaccaacgacgacgaaguccucauagaagugaaucccccguucggcgacagcuacaucaucguaggacgcggcgacucccgacugacguaccaauggcauaaagaaggcagcagcauuggaaaacuauucacccaaaccaugaagggcgucgaaagacucgcggugaugggagacaccgcaugggacuucucgagcgcaggcggcuucuucacaagcguaggaaaagggauucacacaguauucggauccgcauuccaaggccucuucgggggacuaaacuggauaacgaaaguaauaaugggagcaguucucauauggguaggaaucaacacacgaaacaugacaauguccaugucaaugauacucguaggcguaaucaugauguuucugucacucggagugggagcaugaggacuaguaauaaggaaacuguaugaaugucugugggcaggaagugaagagauccuucuguaaagguuuuuggaauuaugucugcugaauaauaaacuuuuuugaaauaauaaaucugguagaaaaaugagaucuaaaaaaaaaaaaaaaaaaaaaaaaaaaaaaaaaaaaaaaaaaaaaaaaaaaaaaaaaaaaaaaaugcaucccccccccccccccccccccccccccccccaaaggcucuuuucagagccaccagaauu

SEQ ID NO: 1888 - RNA, 2453 nt, Artificial Sequence
  mRNA product Design g-4 comprising derived and/or modified sequence from YFV__NC_002031.1__SSjev(V3)-prME-XX (polyprotein: aa122-788) (opt11)
gggagacuccugucgggcggaaguaggaggaguagaguuuaaaaacaguacucuuuuuccgguucgggacguaguugaagcaacgacaagccggauaaccgcucuugagacaggaagcuuaccaugaacgagggcucgaucaugugguuggccucgcucgcggucgugaucgcgugcgcgggcgcggugacccuaguaaggaaaaacagauggcuacuacuaaacguaaccucagaagaucuaggaaagacauuuucagucggcacaggcaacugcacaaccaacauacuagaagcaaaauauuggugcccagacagcauggaauacaacugucccaaccucagcccaagagaggaaccagacgacauagacugcugguguuacggaguagaaaacguaagaguggcauacggcaaaugcgacagcgcaggcaggagccgaagaucccgcagagccaucgacuugcccacgcacgaaaaccacggccucaaaacacgacaagaaaaauggaugacagggcgaaugggagaacgacagcuccagaaaauagaacgaugguucguccggaacccguucuucgcaguaacggcacuaacaaucgcauaccucguaggcagcaacaugacacaaagaguggucaucgcgcuacucguacuagcaguggggcccgcauacagugcacacugcauaggaaucacagaccgugacuucaucgaaggcguacacggaggaacguggguaagcgcgacacuggaacaagacaaaugcgugacaguaauggcaccagacaaaccaagccuagacauaucccuagaaacggucgccaucgaccgucccgcagaaguacgaaagguaugcuauaaugcaguccucacacacgucaaaauaaacgacaaaugccccagcacgggcgaagcacaccucgccgaagaaaacgaaggggauaacgcgugcaaacgcaccuacuccgacaggggauggggcaacggaugcggacuguucggaaaaggauccauagucgcaugcgcaaaauuuaccugcgcaaaaagcaugagcuuguucgagguagaccaaacgaagauccaauacguaauccgagcucaacuacacguuggggccaagcaagagaacuggaauacggacaucaaaacacuaaaauucgacgcacucuccggcucacaagaagucgaguucaucggcuacggcaaagcaacacuagaaugccaaguacaaacagcgguggacuucggcaacagcuacauagcagaaauggaaacagaaagcuggauaguagaccgacaaugggcacaagaccuaacucugccauggcaaagcggcucaggaggaguguggagagagaugcaccaccugguagaguucgaacccccacacgcagcaacaauaaggguacuggcacuaggcaaccaagaaggcagccuaaaaaccgcacucacaggagccaugcgcgugacgaaggacaccaacgacaacaaccucuacaaacuccacggagggcacguauccugccgcguaaaacuaucagcacuaacgcuaaaaggaacaagcuacaaaauaugcacagacaaaauguucuucgucaaaaaccccacagacacaggccacggcacagucguaaugcaagugaaggucagcaagggggcccccugccgaaucccagucauaguggcagacgaccucacggccgccaucaacaaagggauccugguaacagugaacccaauagcaucgaccaacgacgacgaaguccucauagaagugaaucccccguucggcgacagcuacaucaucguaggacgcggcgacucccgacugacguaccaauggcauaaagaaggcagcagcauuggaaaacuauucacccaaaccaugaagggcgucgaaagacucgcggugaugggagacaccgcaugggacuucucgagcgcaggcggcuucuucacaagcguaggaaaagggauucacacaguauucggauccgcauuccaaggccucuucgggggacuaaacuggauaacgaaaguaauaaugggagcaguucucauauggguaggaaucaacacacgaaacaugacaauguccaugucaaugauacucguaggcguaaucaugauguuucugucacucggagugggagcagaccaagguugcgccauaaacuucggcaagugaggacuaguaauaaggaaacuguaugaaugucugugggcaggaagugaagagauccuucuguaaagguuuuuggaauuaugucugcugaauaauaaacuuuuuugaaauaauaaaucugguagaaaaaugagaucuaaaaaaaaaaaaaaaaaaaaaaaaaaaaaaaaaaaaaaaaaaaaaaaaaaaaaaaaaaaaaaaaugcaucccccccccccccccccccccccccccccccaaaggcucuuuucagagccaccagaauu

SEQ ID NO: 1889 - RNA, 2513 nt, Artificial Sequence
  mRNA product Design h-4 comprising derived and/or modified sequence from YFV__NC_002031.1__X-SS-prMEdelstem_TM-JEV (polyprotein: aa92-681) (wt)
gggagagggcgcuuggcuugcaaggacccugagcugcggcauugaagcacacccaacccaacucgacugaagucagccucacugaaccggaucugagaaucuucucucucugggcuugccagggcucuccgaaccuagcuagcauccucuucaauuccaacuagaaagcuuaccaugagaggauuguccucaaggaaacgccguucccaugauguucugacugugcaauuccuaauuuugggaaugcuguugaugacggguggagugaccuuggugcggaaaaacagaugguugcuccuaaaugugacaucugaggaccucgggaaaacauucucugugggcacaggcaacugcacaacaaacauuuuggaagccaaguacuggugcccagacucaauggaauacaacugucccaaucucaguccaagagaggagccagaugacauugauugcuggugcuaugggguggaaaacguuagagucgcauaugguaagugugacucagcaggcaggucuaggaggucaagaagggccauugacuugccuacgcaugaaaaccaugguuugaagacccggcaagaaaaauggaugacuggaagaaugggugaaaggcaacuccaaaagauugagagaugguucgugaggaaccccuuuuuugcagugacggcucugaccauugccuaccuugugggaagcaacaugacgcaacgagucgugauugcccuacuggucuuggcuguugguccggccuacucagcucacugcauuggaauuacugacagggauuucauugagggggugcauggaggaacuuggguuucagcuacccuggagcaagacaagugugucacuguuauggccccugacaagccuucauuggacaucucacuagagacaguagccauugauagaccugcugaggugaggaaaguguguuacaaugcaguucucacucaugugaagauuaaugacaagugccccagcacuggagaggcccaccuagcugaagagaacgaaggggacaaugcgugcaagcgcacuuauucugauagaggcuggggcaauggcuguggccuauuugggaaagggagcauuguggcaugcgccaaauucacuugugccaaauccaugaguuuguuugagguugaucagaccaaaauucaguaugucaucagagcacaauugcauguaggggccaagcaggaaaauuggaauaccgacauuaagacucucaaguuugaugcccugucaggcucccaggaagucgaguucauuggguauggaaaagcuacacuggaaugccaggugcaaacugcgguggacuuugguaacaguuacaucgcugagauggaaacagagagcuggauaguggacagacagugggcccaggacuugacccugccauggcagaguggaaguggcgggguguggagagagaugcaucaucuugucgaauuugaaccuccgcaugccgccacuaucagaguacuggcccugggaaaccaggaaggcuccuugaaaacagcucuuacuggcgcaaugaggguuacaaaggacacaaaugacaacaaccuuuacaaacuacaugguggacauguuucuugcagagugaaauugucagcuuugacacucaaggggacauccuacaaaauaugcacugacaaaauguuuuuugucaagaacccaacugacacuggccauggcacuguugugaugcaggugaaagugucaaaaggagcccccugcaggauuccagugauaguagcugaugaucuuacagcggcaaucaauaaaggcauuuugguuacaguuaaccccaucgccucaaccaaugaugaugaagugcugauugaggugaacccaccuuuuggagacagcuacauuaucguugggagaggagauucacgucucacuuaccaguggcacaaagagggaagcucaauaggcagcacgcugggcaaggccuuuucaacaacuuugaagggagcucaaagacuggcagcguugggcgacacagccugggacuuuggcucuauuggaggggucuucaacuccauaggaagagccguucaccaaguguuugguggugccuucagaacacucuuugggggaaugucuuggaucacacaagggcuaaugggugcccuacugcucuggaugggcgucaacgcacgagaccgaucaauugcuuuggccuucuuagccacaggaggugugcucguguucuuagcgaccaaugugcacgccuaaggacuaguaauaaggaaacuguaugaaugucugugggcaggaagugaagagauccuucuguaaagguuuuuggaauuaugucugcugaauaauaaacuuuuuugaaauaauaaaucugguagaaaaaugagaucuaaaaaaaaaaaaaaaaaaaaaaaaaaaaaaaaaaaaaaaaaaaaaaaaaaaaaaaaaaaaaaaaugcaucccccccccccccccccccccccccccccccaaaggcucuuuucagagccaccagaauu

SEQ ID NO: 1890 - RNA, 2486 nt, Artificial Sequence
  mRNA product Design h-4 comprising derived and/or modified sequence from YFV__NC_002031.1__SSjev(V3)-prMEdelstem_TM-JEV (polyprotein: aa122-681) (wt)
gggagagggcgcuuggcuugcaaggacccugagcugcggcauugaagcacacccaacccaacucgacugaagucagccucacugaaccggaucugagaaucuucucucucugggcuugccagggcucuccgaaccuagcuagcauccucuucaauuccaacuagaaagcuuaccaugaaugaaggcucaaucauguggcucgcgagcuuggcaguugucauagcuugugcaggagccgugaccuuggugcggaaaaacagaugguugcuccuaaaugugacaucugaggaccucgggaaaacauucucugugggcacaggcaacugcacaacaaacauuuuggaagccaaguacuggugcccagacucaauggaauacaacugucccaaucucaguccaagagaggagccagaugacauugauugcuggugcuaugggguggaaaacguuagagucgcauaugguaagugugacucagcaggcaggucuaggaggucaagaagggccauugacuugccuacgcaugaaaaccaugguuugaagacccggcaagaaaaauggaugacuggaagaaugggugaaaggcaacuccaaaagauugagagaugguucgugaggaaccccuuuuuugcagugacggcucugaccauugccuaccuugugggaagcaacaugacgcaacgagucgugauugcccuacuggucuuggcuguugguccggccuacucagcucacugcauuggaauuacugacagggauuucauugagggggugcauggaggaacuuggguuucagcuacccuggagcaagacaagugugucacuguuauggccccugacaagccuucauuggacaucucacuagagacaguagccauugauagaccugcugaggugaggaaaguguguuacaaugcaguucucacucaugugaagauuaaugacaagugccccagcacuggagaggcccaccuagcugaagagaacgaaggggacaaugcgugcaagcgcacuuauucugauagaggcuggggcaauggcuguggccuauuugggaaagggagcauuguggcaugcgccaaauucacuugugccaaauccaugaguuuguuugagguugaucagaccaaaauucaguaugucaucagagcacaauugcauguaggggccaagcaggaaaauuggaauaccgacauuaagacucucaaguuugaugcccugucaggcucccaggaagucgaguucauuggguauggaaaagcuacacuggaaugccaggugcaaacugcgguggacuuugguaacaguuacaucgcugagauggaaacagagagcuggauaguggacagacagugggcccaggacuugacccugccauggcagaguggaaguggcgggguguggagagagaugcaucaucuugucgaauuugaaccuccgcaugccgccacuaucagaguacuggcccugggaaaccaggaaggcuccuugaaaacagcucuuacuggcgcaaugaggguuacaaaggacacaaaugacaacaaccuuuacaaacuacaugguggacauguuucuugcagagugaaauugucagcuuugacacucaaggggacauccuacaaaauaugcacugacaaaauguuuuuugucaagaacccaacugacacuggccauggcacuguugugaugcaggugaaagugucaaaaggagcccccugcaggauuccagugauaguagcugaugaucuuacagcggcaaucaauaaaggcauuuugguuacaguuaaccccaucgccucaaccaaugaugaugaagugcugauugaggugaacccaccuuuuggagacagcuacauuaucguugggagaggagauucacgucucacuuaccaguggcacaaagagggaagcucaauaggcagcacgcugggcaaggccuuuucaacaacuuugaagggagcucaaagacuggcagcguugggcgacacagccugggacuuuggcucuauuggaggggucuucaacuccauaggaagagccguucaccaaguguuugguggugccuucagaacacucuuugggggaaugucuuggaucacacaagggcuaaugggugcccuacugcucuggaugggcgucaacgcacgagaccgaucaauugcuuuggccuucuuagccacaggaggugugcucguguucuuagcgaccaaugugcacgccuaaggacuaguaauaaggaaacuguaugaaugucugugggcaggaagugaagagauccuucuguaaagguuuuuggaauuaugucugcugaauaauaaacuuuuuugaaauaauaaaucugguagaaaaaugagaucuaaaaaaaaaaaaaaaaaaaaaaaaaaaaaaaaaaaaaaaaaaaaaaaaaaaaaaaaaaaaaaaaugcaucccccccccccccccccccccccccccccccaaaggcucuuuucagagccaccagaauu

SEQ ID NO: 1891 - RNA, 2501 nt, Artificial Sequence
  mRNA product Design h-4 comprising derived and/or modified sequence from YFV__NC_002031.1__X-SS-prME (polyprotein: aa92-778) (wt)
gggagagggcgcuuggcuugcaaggacccugagcugcggcauugaagcacacccaacccaacucgacugaagucagccucacugaaccggaucugagaaucuucucucucugggcuugccagggcucuccgaaccuagcuagcauccucuucaauuccaacuagaaagcuuaccaugagaggauuguccucaaggaaacgccguucccaugauguucugacugugcaauuccuaauuuugggaaugcuguugaugacggguggagugaccuuggugcggaaaaacagaugguugcuccuaaaugugacaucugaggaccucgggaaaacauucucugugggcacaggcaacugcacaacaaacauuuuggaagccaaguacuggugcccagacucaauggaauacaacugucccaaucucaguccaagagaggagccagaugacauugauugcuggugcuaugggguggaaaacguuagagucgcauaugguaagugugacucagcaggcaggucuaggaggucaagaagggccauugacuugccuacgcaugaaaaccaugguuugaagacccggcaagaaaaauggaugacuggaagaaugggugaaaggcaacuccaaaagauugagagaugguucgugaggaaccccuuuuuugcagugacggcucugaccauugccuaccuugugggaagcaacaugacgcaacgagucgugauugcccuacuggucuuggcuguugguccggccuacucagcucacugcauuggaauuacugacagggauuucauugagggggugcauggaggaacuuggguuucagcuacccuggagcaagacaagugugucacuguuauggccccugacaagccuucauuggacaucucacuagagacaguagccauugauagaccugcugaggugaggaaaguguguuacaaugcaguucucacucaugugaagauuaaugacaagugccccagcacuggagaggcccaccuagcugaagagaacgaaggggacaaugcgugcaagcgcacuuauucugauagaggcuggggcaauggcuguggccuauuugggaaagggagcauuguggcaugcgccaaauucacuugugccaaauccaugaguuuguuugagguugaucagaccaaaauucaguaugucaucagagcacaauugcauguaggggccaagcaggaaaauuggaauaccgacauuaagacucucaaguuugaugcccugucaggcucccaggaagucgaguucauuggguauggaaaagcuacacuggaaugccaggugcaaacugcgguggacuuugguaacaguuacaucgcugagauggaaacagagagcuggauaguggacagacagugggcccaggacuugacccugccauggcagaguggaaguggcgggguguggagagagaugcaucaucuugucgaauuugaaccuccgcaugccgccacuaucagaguacuggcccugggaaaccaggaaggcuccuugaaaacagcucuuacuggcgcaaugaggguuacaaaggacacaaaugacaacaaccuuuacaaacuacaugguggacauguuucuugcagagugaaauugucagcuuugacacucaaggggacauccuacaaaauaugcacugacaaaauguuuuuugucaagaacccaacugacacuggccauggcacuguugugaugcaggugaaagugucaaaaggagcccccugcaggauuccagugauaguagcugaugaucuuacagcggcaaucaauaaaggcauuuugguuacaguuaaccccaucgccucaaccaaugaugaugaagugcugauugaggugaacccaccuuuuggagacagcuacauuaucguugggagaggagauucacgucucacuuaccaguggcacaaagagggaagcucaauaggaaaguuguucacucagaccaugaaaggcguggaacgccuggccgucaugggagacaccgccugggauuucagcuccgcuggaggguucuucacuucgguugggaaaggaauccauacgguguuuggcucugccuuucaggggcuauuuggcggcuugaacuggauaacaaaggucaucaugggggcgguacuuauauggguuggcaucaacacaagaaacaugacaauguccaugagcaugaucuugguaggagugaucaugauguuuuugucucuaggaguuggggcguaaggacuaguaauaaggaaacuguaugaaugucugugggcaggaagugaagagauccuucuguaaagguuuuuggaauuaugucugcugaauaauaaacuuuuuugaaauaauaaaucugguagaaaaaugagaucuaaaaaaaaaaaaaaaaaaaaaaaaaaaaaaaaaaaaaaaaaaaaaaaaaaaaaaaaaaaaaaaaugcaucccccccccccccccccccccccccccccccaaaggcucuuuucagagccaccagaauu

SEQ ID NO: 1892 - RNA, 2504 nt, Artificial Sequence
  mRNA product Design h-4 comprising derived and/or modified sequence from YFV__NC_002031.1__SSjev(V3)-prME-XX (polyprotein: aa122-788) (wt)
gggagagggcgcuuggcuugcaaggacccugagcugcggcauugaagcacacccaacccaacucgacugaagucagccucacugaaccggaucugagaaucuucucucucugggcuugccagggcucuccgaaccuagcuagcauccucuucaauuccaacuagaaagcuuaccaugaaugaaggcucaaucauguggcucgcgagcuuggcaguugucauagcuugugcaggagccgugaccuuggugcggaaaaacagaugguugcuccuaaaugugacaucugaggaccucgggaaaacauucucugugggcacaggcaacugcacaacaaacauuuuggaagccaaguacuggugcccagacucaauggaauacaacugucccaaucucaguccaagagaggagccagaugacauugauugcuggugcuaugggguggaaaacguuagagucgcauaugguaagugugacucagcaggcaggucuaggaggucaagaagggccauugacuugccuacgcaugaaaaccaugguuugaagacccggcaagaaaaauggaugacuggaagaaugggugaaaggcaacuccaaaagauugagagaugguucgugaggaaccccuuuuuugcagugacggcucugaccauugccuaccuugugggaagcaacaugacgcaacgagucgugauugcccuacuggucuuggcuguugguccggccuacucagcucacugcauuggaauuacugacagggauuucauugagggggugcauggaggaacuuggguuucagcuacccuggagcaagacaagugugucacuguuauggccccugacaagccuucauuggacaucucacuagagacaguagccauugauagaccugcugaggugaggaaaguguguuacaaugcaguucucacucaugugaagauuaaugacaagugccccagcacuggagaggcccaccuagcugaagagaacgaaggggacaaugcgugcaagcgcacuuauucugauagaggcuggggcaauggcuguggccuauuugggaaagggagcauuguggcaugcgccaaauucacuugugccaaauccaugaguuuguuugagguugaucagaccaaaauucaguaugucaucagagcacaauugcauguaggggccaagcaggaaaauuggaauaccgacauuaagacucucaaguuugaugcccugucaggcucccaggaagucgaguucauuggguauggaaaagcuacacuggaaugccaggugcaaacugcgguggacuuugguaacaguuacaucgcugagauggaaacagagagcuggauaguggacagacagugggcccaggacuugacccugccauggcagaguggaaguggcgggguguggagagagaugcaucaucuugucgaauuugaaccuccgcaugccgccacuaucagaguacuggcccugggaaaccaggaaggcuccuugaaaacagcucuuacuggcgcaaugaggguuacaaaggacacaaaugacaacaaccuuuacaaacuacaugguggacauguuucuugcagagugaaauugucagcuuugacacucaaggggacauccuacaaaauaugcacugacaaaauguuuuuugucaagaacccaacugacacuggccauggcacuguugugaugcaggugaaagugucaaaaggagcccccugcaggauuccagugauaguagcugaugaucuuacagcggcaaucaauaaaggcauuuugguuacaguuaaccccaucgccucaaccaaugaugaugaagugcugauugaggugaacccaccuuuuggagacagcuacauuaucguugggagaggagauucacgucucacuuaccaguggcacaaagagggaagcucaauaggaaaguuguucacucagaccaugaaaggcguggaacgccuggccgucaugggagacaccgccugggauuucagcuccgcuggaggguucuucacuucgguugggaaaggaauccauacgguguuuggcucugccuuucaggggcuauuuggcggcuugaacuggauaacaaaggucaucaugggggcgguacuuauauggguuggcaucaacacaagaaacaugacaauguccaugagcaugaucuugguaggagugaucaugauguuuuugucucuaggaguuggggcggaucaaggaugcgccaucaacuuuggcaaguaaggacuaguaauaaggaaacuguaugaaugucugugggcaggaagugaagagauccuucuguaaagguuuuuggaauuaugucugcugaauaauaaacuuuuuugaaauaauaaaucugguagaaaaaugagaucuaaaaaaaaaaaaaaaaaaaaaaaaaaaaaaaaaaaaaaaaaaaaaaaaaaaaaaaaaaaaaaaaugcaucccccccccccccccccccccccccccccccaaaggcucuuuucagagccaccagaauu

SEQ ID NO: 1893 - RNA, 2513 nt, Artificial Sequence
  mRNA product Design h-4 comprising derived and/or modified sequence from YFV__NC_002031.1__X-SS-prMEdelstem_TM-JEV (polyprotein: aa92-681) (opt1)
gggagagggcgcuuggcuugcaaggacccugagcugcggcauugaagcacacccaacccaacucgacugaagucagccucacugaaccggaucugagaaucuucucucucugggcuugccagggcucuccgaaccuagcuagcauccucuucaauuccaacuagaaagcuuaccaugcggggccugagcucccgcaagcggcgcagccacgacgugcucaccguccaguuccugauccuggggaugcuccugaugaccggcggggugacgcuggugcggaagaaccgcuggcuccugcugaacgucaccuccgaggaccucggcaagaccuucagcguggggaccggcaacugcacgaccaacauccuggaggccaaguacuggugccccgacuccauggaguacaacugcccgaaccugagcccccgggaggagcccgacgacaucgacugcuggugcuacggcguggagaacguccgcguggccuacgggaagugcgacuccgcgggccggagccgccggucccgccgggccaucgaccuccccacccacgagaaccacgggcugaagacccgccaggagaaguggaugacgggccggaugggggagcgccagcugcagaagaucgagcggugguucgugcgcaacccguucuucgccgucaccgcccucaccaucgccuaccuggugggcagcaacaugacccagcggguggucaucgcgcugcucgugcuggccgugggccccgccuacuccgcccacugcaucgggaucacggaccgcgacuucaucgagggcguccacgggggcaccugggugagcgcgacccuggagcaggacaagugcgugaccgucauggcccccgacaagcccucccucgacaucagccuggagacgguggccaucgaccggccggccgaggugcgcaaggucugcuacaacgccgugcugacccacgugaagaucaacgacaagugccccuccaccggcgaggcgcaccucgccgaggagaacgagggggacaacgccugcaagcggaccuacagcgaccggggcugggggaacggcugcgggcuguucggcaagggcuccaucgucgccugcgccaaguucacgugcgcgaagagcaugucccuguucgagguggaccagaccaagauccaguacgucauccgcgcccagcuccacgugggggccaagcaggagaacuggaacaccgacaucaagacccugaaguucgacgcccugagcggcagccaggagguggaguucaucggguacggcaaggccacgcucgagugccagguccagaccgcgguggacuucgggaacuccuacaucgccgagauggagaccgagagcuggaucguggaccggcagugggcccaggaccugacccugcccuggcaguccggcagcggcggggucuggcgcgagaugcaccaccucguggaguucgagcccccgcacgccgccacgauccgggugcuggcgcugggcaaccaggaggggucccucaagaccgcccugaccggcgccaugcgcgucaccaaggacacgaacgacaacaaccuguacaagcuccacgggggccacgugagcugccgggugaagcuguccgcccugacccucaagggcaccagcuacaagaucugcaccgacaagauguucuucgucaagaaccccacggacaccgggcacggcaccguggugaugcaggucaagguguccaagggggcgcccugccgcaucccggugaucgucgccgacgaccugaccgccgccaucaacaagggcauccuggugaccgugaacccgaucgccagcacgaacgacgacgagguccucaucgaggugaacccccccuucggcgacuccuacaucaucguggggcggggcgacagccgccugaccuaccaguggcacaaggagggguccagcaucggcagcacccuggggaaggccuucuccaccacgcucaagggcgcccagcgccuggcggcccugggggacaccgccugggacuucggcagcaucgggggcguguucaacuccaucggccgggccguccaccagguguucgggggcgccuuccgcacccucuucgggggcaugagcuggaucacccaggggcugaugggcgcgcugcuccuguggaugggggugaacgcccgggaccgcuccaucgcccuggccuuccucgcgacgggcggcguccugguguuccuggccaccaacgugcacgccugaggacuaguaauaaggaaacuguaugaaugucugugggcaggaagugaagagauccuucuguaaagguuuuuggaauuaugucugcugaauaauaaacuuuuuugaaauaauaaaucugguagaaaaaugagaucuaaaaaaaaaaaaaaaaaaaaaaaaaaaaaaaaaaaaaaaaaaaaaaaaaaaaaaaaaaaaaaaaugcaucccccccccccccccccccccccccccccccaaaggcucuuuucagagccaccagaauu

SEQ ID NO: 1894 - RNA, 2486 nt, Artificial Sequence
  mRNA product Design h-4 comprising derived and/or modified sequence from YFV__NC_002031.1__SSjev(V3)-prMEdelstem_TM-JEV (polyprotein: aa122-681) (opt1)
gggagagggcgcuuggcuugcaaggacccugagcugcggcauugaagcacacccaacccaacucgacugaagucagccucacugaaccggaucugagaaucuucucucucugggcuugccagggcucuccgaaccuagcuagcauccucuucaauuccaacuagaaagcuuaccaugaacgagggcagcaucauguggcuggccucccucgccguggucaucgcgugcgccggggccgugacgcuggugcggaagaaccgcuggcuccugcugaacgucaccuccgaggaccucggcaagaccuucagcguggggaccggcaacugcacgaccaacauccuggaggccaaguacuggugccccgacuccauggaguacaacugcccgaaccugagcccccgggaggagcccgacgacaucgacugcuggugcuacggcguggagaacguccgcguggccuacgggaagugcgacuccgcgggccggagccgccggucccgccgggccaucgaccuccccacccacgagaaccacgggcugaagacccgccaggagaaguggaugacgggccggaugggggagcgccagcugcagaagaucgagcggugguucgugcgcaacccguucuucgccgucaccgcccucaccaucgccuaccuggugggcagcaacaugacccagcggguggucaucgcgcugcucgugcuggccgugggccccgccuacuccgcccacugcaucgggaucacggaccgcgacuucaucgagggcguccacgggggcaccugggugagcgcgacccuggagcaggacaagugcgugaccgucauggcccccgacaagcccucccucgacaucagccuggagacgguggccaucgaccggccggccgaggugcgcaaggucugcuacaacgccgugcugacccacgugaagaucaacgacaagugccccuccaccggcgaggcgcaccucgccgaggagaacgagggggacaacgccugcaagcggaccuacagcgaccggggcugggggaacggcugcgggcuguucggcaagggcuccaucgucgccugcgccaaguucacgugcgcgaagagcaugucccuguucgagguggaccagaccaagauccaguacgucauccgcgcccagcuccacgugggggccaagcaggagaacuggaacaccgacaucaagacccugaaguucgacgcccugagcggcagccaggagguggaguucaucggguacggcaaggccacgcucgagugccagguccagaccgcgguggacuucgggaacuccuacaucgccgagauggagaccgagagcuggaucguggaccggcagugggcccaggaccugacccugcccuggcaguccggcagcggcggggucuggcgcgagaugcaccaccucguggaguucgagcccccgcacgccgccacgauccgggugcuggcgcugggcaaccaggaggggucccucaagaccgcccugaccggcgccaugcgcgucaccaaggacacgaacgacaacaaccuguacaagcuccacgggggccacgugagcugccgggugaagcuguccgcccugacccucaagggcaccagcuacaagaucugcaccgacaagauguucuucgucaagaaccccacggacaccgggcacggcaccguggugaugcaggucaagguguccaagggggcgcccugccgcaucccggugaucgucgccgacgaccugaccgccgccaucaacaagggcauccuggugaccgugaacccgaucgccagcacgaacgacgacgagguccucaucgaggugaacccccccuucggcgacuccuacaucaucguggggcggggcgacagccgccugaccuaccaguggcacaaggagggguccagcaucggcagcacccuggggaaggccuucuccaccacgcucaagggcgcccagcgccuggcggcccugggggacaccgccugggacuucggcagcaucgggggcguguucaacuccaucggccgggccguccaccagguguucgggggcgccuuccgcacccucuucgggggcaugagcuggaucacccaggggcugaugggcgcgcugcuccuguggaugggggugaacgcccgggaccgcuccaucgcccuggccuuccucgcgacgggcggcguccugguguuccuggccaccaacgugcacgccugaggacuaguaauaaggaaacuguaugaaugucugugggcaggaagugaagagauccuucuguaaagguuuuuggaauuaugucugcugaauaauaaacuuuuuugaaauaauaaaucugguagaaaaaugagaucuaaaaaaaaaaaaaaaaaaaaaaaaaaaaaaaaaaaaaaaaaaaaaaaaaaaaaaaaaaaaaaaaugcaucccccccccccccccccccccccccccccccaaaggcucuuuucagagccaccagaauu

SEQ ID NO: 1895 - RNA, 2501 nt, Artificial Sequence
  mRNA product Design h-4 comprising derived and/or modified sequence from YFV__NC_002031.1__X-SS-prME (polyprotein: aa92-778) (opt1)
gggagagggcgcuuggcuugcaaggacccugagcugcggcauugaagcacacccaacccaacucgacugaagucagccucacugaaccggaucugagaaucuucucucucugggcuugccagggcucuccgaaccuagcuagcauccucuucaauuccaacuagaaagcuuaccaugcggggccugagcucccgcaagcggcgcagccacgacgugcucaccguccaguuccugauccuggggaugcuccugaugaccggcggggugacgcuggugcggaagaaccgcuggcuccugcugaacgucaccuccgaggaccucggcaagaccuucagcguggggaccggcaacugcacgaccaacauccuggaggccaaguacuggugccccgacuccauggaguacaacugcccgaaccugagcccccgggaggagcccgacgacaucgacugcuggugcuacggcguggagaacguccgcguggccuacgggaagugcgacuccgcgggccggagccgccggucccgccgggccaucgaccuccccacccacgagaaccacgggcugaagacccgccaggagaaguggaugacgggccggaugggggagcgccagcugcagaagaucgagcggugguucgugcgcaacccguucuucgccgucaccgcccucaccaucgccuaccuggugggcagcaacaugacccagcggguggucaucgcgcugcucgugcuggccgugggccccgccuacuccgcccacugcaucgggaucacggaccgcgacuucaucgagggcguccacgggggcaccugggugagcgcgacccuggagcaggacaagugcgugaccgucauggcccccgacaagcccucccucgacaucagccuggagacgguggccaucgaccggccggccgaggugcgcaaggucugcuacaacgccgugcugacccacgugaagaucaacgacaagugccccuccaccggcgaggcgcaccucgccgaggagaacgagggggacaacgccugcaagcggaccuacagcgaccggggcugggggaacggcugcgggcuguucggcaagggcuccaucgucgccugcgccaaguucacgugcgcgaagagcaugucccuguucgagguggaccagaccaagauccaguacgucauccgcgcccagcuccacgugggggccaagcaggagaacuggaacaccgacaucaagacccugaaguucgacgcccugagcggcagccaggagguggaguucaucggguacggcaaggccacgcucgagugccagguccagaccgcgguggacuucgggaacuccuacaucgccgagauggagaccgagagcuggaucguggaccggcagugggcccaggaccugacccugcccuggcaguccggcagcggcggggucuggcgcgagaugcaccaccucguggaguucgagcccccgcacgccgccacgauccgggugcuggcgcugggcaaccaggaggggucccucaagaccgcccugaccggcgccaugcgcgucaccaaggacacgaacgacaacaaccuguacaagcuccacgggggccacgugagcugccgggugaagcuguccgcccugacccucaagggcaccagcuacaagaucugcaccgacaagauguucuucgucaagaaccccacggacaccgggcacggcaccguggugaugcaggucaagguguccaagggggcgcccugccgcaucccggugaucgucgccgacgaccugaccgccgccaucaacaagggcauccuggugaccgugaacccgaucgccagcacgaacgacgacgagguccucaucgaggugaacccccccuucggcgacuccuacaucaucguggggcggggcgacagccgccugaccuaccaguggcacaaggagggguccagcaucggcaagcuguucacccagaccaugaagggggucgagcggcuggcggugaugggcgacacggccugggacuucuccagcgccggcggguucuucaccuccgugggcaaggggauccacaccgucuucggcagcgccuuccaggggcucuucggcggccugaacuggaucaccaaggugaucaugggggccgugcugaucugggucggcaucaacacgcgcaacaugaccauguccaugagcaugauccucgugggggugaucaugauguuccugagccugggcgucggggcgugaggacuaguaauaaggaaacuguaugaaugucugugggcaggaagugaagagauccuucuguaaagguuuuuggaauuaugucugcugaauaauaaacuuuuuugaaauaauaaaucugguagaaaaaugagaucuaaaaaaaaaaaaaaaaaaaaaaaaaaaaaaaaaaaaaaaaaaaaaaaaaaaaaaaaaaaaaaaaugcaucccccccccccccccccccccccccccccccaaaggcucuuuucagagccaccagaauu

SEQ ID NO: 1896 - RNA, 2504 nt, Artificial Sequence
  mRNA product Design h-4 comprising derived and/or modified sequence from YFV__NC_002031.1__SSjev(V3)-prME-XX (polyprotein: aa122-788) (opt1)
gggagagggcgcuuggcuugcaaggacccugagcugcggcauugaagcacacccaacccaacucgacugaagucagccucacugaaccggaucugagaaucuucucucucugggcuugccagggcucuccgaaccuagcuagcauccucuucaauuccaacuagaaagcuuaccaugaacgagggcagcaucauguggcuggccucccucgccguggucaucgcgugcgccggggccgugacgcuggugcggaagaaccgcuggcuccugcugaacgucaccuccgaggaccucggcaagaccuucagcguggggaccggcaacugcacgaccaacauccuggaggccaaguacuggugccccgacuccauggaguacaacugcccgaaccugagcccccgggaggagcccgacgacaucgacugcuggugcuacggcguggagaacguccgcguggccuacgggaagugcgacuccgcgggccggagccgccggucccgccgggccaucgaccuccccacccacgagaaccacgggcugaagacccgccaggagaaguggaugacgggccggaugggggagcgccagcugcagaagaucgagcggugguucgugcgcaacccguucuucgccgucaccgcccucaccaucgccuaccuggugggcagcaacaugacccagcggguggucaucgcgcugcucgugcuggccgugggccccgccuacuccgcccacugcaucgggaucacggaccgcgacuucaucgagggcguccacgggggcaccugggugagcgcgacccuggagcaggacaagugcgugaccgucauggcccccgacaagcccucccucgacaucagccuggagacgguggccaucgaccggccggccgaggugcgcaaggucugcuacaacgccgugcugacccacgugaagaucaacgacaagugccccuccaccggcgaggcgcaccucgccgaggagaacgagggggacaacgccugcaagcggaccuacagcgaccggggcugggggaacggcugcgggcuguucggcaagggcuccaucgucgccugcgccaaguucacgugcgcgaagagcaugucccuguucgagguggaccagaccaagauccaguacgucauccgcgcccagcuccacgugggggccaagcaggagaacuggaacaccgacaucaagacccugaaguucgacgcccugagcggcagccaggagguggaguucaucggguacggcaaggccacgcucgagugccagguccagaccgcgguggacuucgggaacuccuacaucgccgagauggagaccgagagcuggaucguggaccggcagugggcccaggaccugacccugcccuggcaguccggcagcggcggggucuggcgcgagaugcaccaccucguggaguucgagcccccgcacgccgccacgauccgggugcuggcgcugggcaaccaggaggggucccucaagaccgcccugaccggcgccaugcgcgucaccaaggacacgaacgacaacaaccuguacaagcuccacgggggccacgugagcugccgggugaagcuguccgcccugacccucaagggcaccagcuacaagaucugcaccgacaagauguucuucgucaagaaccccacggacaccgggcacggcaccguggugaugcaggucaagguguccaagggggcgcccugccgcaucccggugaucgucgccgacgaccugaccgccgccaucaacaagggcauccuggugaccgugaacccgaucgccagcacgaacgacgacgagguccucaucgaggugaacccccccuucggcgacuccuacaucaucguggggcggggcgacagccgccugaccuaccaguggcacaaggagggguccagcaucggcaagcuguucacccagaccaugaagggggucgagcggcuggcggugaugggcgacacggccugggacuucuccagcgccggcggguucuucaccuccgugggcaaggggauccacaccgucuucggcagcgccuuccaggggcucuucggcggccugaacuggaucaccaaggugaucaugggggccgugcugaucugggucggcaucaacacgcgcaacaugaccauguccaugagcaugauccucgugggggugaucaugauguuccugagccugggcgucggggcggaccagggcugcgccaucaacuucggcaagugaggacuaguaauaaggaaacuguaugaaugucugugggcaggaagugaagagauccuucuguaaagguuuuuggaauuaugucugcugaauaauaaacuuuuuugaaauaauaaaucugguagaaaaaugagaucuaaaaaaaaaaaaaaaaaaaaaaaaaaaaaaaaaaaaaaaaaaaaaaaaaaaaaaaaaaaaaaaaugcaucccccccccccccccccccccccccccccccaaaggcucuuuucagagccaccagaauu

SEQ ID NO: 1897 - RNA, 2513 nt, Artificial Sequence
  mRNA product Design h-4 comprising derived and/or modified sequence from YFV__NC_002031.1__X-SS-prMEdelstem_TM-JEV (polyprotein: aa92-681) (opt1)
gggagagggcgcuuggcuugcaaggacccugagcugcggcauugaagcacacccaacccaacucgacugaagucagccucacugaaccggaucugagaaucuucucucucugggcuugccagggcucuccgaaccuagcuagcauccucuucaauuccaacuagaaagcuuaccaugcggggccugagcucccgcaagcggcgcagccacgacgugcucaccguccaguuccugauccuggggaugcuccugaugaccggcggggugacgcuggugcggaagaaccgcuggcuccugcugaacgucaccuccgaggaccucggcaagaccuucagcguggggaccggcaacugcacgaccaacauccuggaggccaaguacuggugccccgacuccauggaguacaacugcccgaaccugagcccccgggaggagcccgacgacaucgacugcuggugcuacggcguggagaacguccgcguggccuacgggaagugcgacuccgcgggccggagccgccggucccgccgggccaucgaccuccccacccacgagaaccacgggcugaagacccgccaggagaaguggaugacgggccggaugggggagcgccagcugcagaagaucgagcggugguucgugcgcaacccguucuucgccgucaccgcccucaccaucgccuaccuggugggcagcaacaugacccagcggguggucaucgcgcugcucgugcuggccgugggccccgccuacuccgcccacugcaucgggaucacggaccgcgacuucaucgagggcguccacgggggcaccugggugagcgcgacccuggagcaggacaagugcgugaccgucauggcccccgacaagcccucccucgacaucagccuggagacgguggccaucgaccggccggccgaggugcgcaaggucugcuacaacgccgugcugacccacgugaagaucaacgacaagugccccuccaccggcgaggcgcaccucgccgaggagaacgagggggacaacgccugcaagcggaccuacagcgaccggggcugggggaacggcugcgggcuguucggcaagggcuccaucgucgccugcgccaaguucacgugcgcgaaguccaugagccuguucgagguggaccagaccaagauccaguacgucauccgcgcccagcuccacgugggggccaagcaggagaacuggaacaccgacaucaagacccugaaguucgacgcccugagcggcagccaggagguggaguucaucggguacggcaaggccacgcucgagugccagguccagaccgcgguggacuucgggaacuccuacaucgccgagauggagaccgagagcuggaucguggaccggcagugggcccaggaccugacccugcccuggcaguccggcagcggcggggucuggcgcgagaugcaccaccucguggaguucgagcccccgcacgccgccacgauccgggugcuggcgcugggcaaccaggaggggucccucaagaccgcccugaccggcgccaugcgcgucaccaaggacacgaacgacaacaaccuguacaagcuccacgggggccacgugagcugccgggugaagcuguccgcccugacccucaagggcaccagcuacaagaucugcaccgacaagauguucuucgucaagaaccccacggacaccgggcacggcaccguggugaugcaggucaagguguccaagggggcgcccugccgcaucccggugaucgucgccgacgaccugaccgccgccaucaacaagggcauccuggugaccgugaacccgaucgccagcacgaacgacgacgagguccucaucgaggugaacccccccuucggcgacuccuacaucaucguggggcggggcgacagccgccugaccuaccaguggcacaaggagggguccagcaucggcagcacccuggggaaggccuucuccaccacgcucaagggcgcccagcgccuggcggcccugggggacaccgccugggacuucggcagcaucgggggcguguucaacuccaucggccgggccguccaccagguguucgggggcgccuuccgcacccucuucgggggcaugagcuggaucacccaggggcugaugggcgcgcugcuccuguggaugggggugaacgcccgggaccgcuccaucgcccuggccuuccucgcgacgggcggcguccugguguuccuggccaccaacgugcacgccugaggacuaguaauaaggaaacuguaugaaugucugugggcaggaagugaagagauccuucuguaaagguuuuuggaauuaugucugcugaauaauaaacuuuuuugaaauaauaaaucugguagaaaaaugagaucuaaaaaaaaaaaaaaaaaaaaaaaaaaaaaaaaaaaaaaaaaaaaaaaaaaaaaaaaaaaaaaaaugcaucccccccccccccccccccccccccccccccaaaggcucuuuucagagccaccagaauu

SEQ ID NO: 1898 - RNA, 2486 nt, Artificial Sequence
  mRNA product Design h-4 comprising derived and/or modified sequence from YFV__NC_002031.1__SSjev(V3)-prMEdelstem_TM-JEV (polyprotein: aa122-681) (opt1)
gggagagggcgcuuggcuugcaaggacccugagcugcggcauugaagcacacccaacccaacucgacugaagucagccucacugaaccggaucugagaaucuucucucucugggcuugccagggcucuccgaaccuagcuagcauccucuucaauuccaacuagaaagcuuaccaugaacgagggcagcaucauguggcuggccucccucgccguggucaucgcgugcgccggggccgugacgcuggugcggaagaaccgcuggcuccugcugaacgucaccuccgaggaccucggcaagaccuucagcguggggaccggcaacugcacgaccaacauccuggaggccaaguacuggugccccgacuccauggaguacaacugcccgaaccugagcccccgggaggagcccgacgacaucgacugcuggugcuacggcguggagaacguccgcguggccuacgggaagugcgacuccgcgggccggagccgccggucccgccgggccaucgaccuccccacccacgagaaccacgggcugaagacccgccaggagaaguggaugacgggccggaugggggagcgccagcugcagaagaucgagcggugguucgugcgcaacccguucuucgccgucaccgcccucaccaucgccuaccuggugggcagcaacaugacccagcggguggucaucgcgcugcucgugcuggccgugggccccgccuacuccgcccacugcaucgggaucacggaccgcgacuucaucgagggcguccacgggggcaccugggugagcgcgacccuggagcaggacaagugcgugaccgucauggcccccgacaagcccucccucgacaucagccuggagacgguggccaucgaccggccggccgaggugcgcaaggucugcuacaacgccgugcugacccacgugaagaucaacgacaagugccccuccaccggcgaggcgcaccucgccgaggagaacgagggggacaacgccugcaagcggaccuacagcgaccggggcugggggaacggcugcgggcuguucggcaagggcuccaucgucgccugcgccaaguucacgugcgcgaaguccaugagccuguucgagguggaccagaccaagauccaguacgucauccgcgcccagcuccacgugggggccaagcaggagaacuggaacaccgacaucaagacccugaaguucgacgcccugagcggcagccaggagguggaguucaucggguacggcaaggccacgcucgagugccagguccagaccgcgguggacuucgggaacuccuacaucgccgagauggagaccgagagcuggaucguggaccggcagugggcccaggaccugacccugcccuggcaguccggcagcggcggggucuggcgcgagaugcaccaccucguggaguucgagcccccgcacgccgccacgauccgggugcuggcgcugggcaaccaggaggggucccucaagaccgcccugaccggcgccaugcgcgucaccaaggacacgaacgacaacaaccuguacaagcuccacgggggccacgugagcugccgggugaagcuguccgcccugacccucaagggcaccagcuacaagaucugcaccgacaagauguucuucgucaagaaccccacggacaccgggcacggcaccguggugaugcaggucaagguguccaagggggcgcccugccgcaucccggugaucgucgccgacgaccugaccgccgccaucaacaagggcauccuggugaccgugaacccgaucgccagcacgaacgacgacgagguccucaucgaggugaacccccccuucggcgacuccuacaucaucguggggcggggcgacagccgccugaccuaccaguggcacaaggagggguccagcaucggcagcacccuggggaaggccuucuccaccacgcucaagggcgcccagcgccuggcggcccugggggacaccgccugggacuucggcagcaucgggggcguguucaacuccaucggccgggccguccaccagguguucgggggcgccuuccgcacccucuucgggggcaugagcuggaucacccaggggcugaugggcgcgcugcuccuguggaugggggugaacgcccgggaccgcuccaucgcccuggccuuccucgcgacgggcggcguccugguguuccuggccaccaacgugcacgccugaggacuaguaauaaggaaacuguaugaaugucugugggcaggaagugaagagauccuucuguaaagguuuuuggaauuaugucugcugaauaauaaacuuuuuugaaauaauaaaucugguagaaaaaugagaucuaaaaaaaaaaaaaaaaaaaaaaaaaaaaaaaaaaaaaaaaaaaaaaaaaaaaaaaaaaaaaaaaugcaucccccccccccccccccccccccccccccccaaaggcucuuuucagagccaccagaauu

SEQ ID NO: 1899 - RNA, 2501 nt, Artificial Sequence
  mRNA product Design h-4 comprising derived and/or modified sequence from YFV__NC_002031.1__X-SS-prME (polyprotein: aa92-778) (opt1)
gggagagggcgcuuggcuugcaaggacccugagcugcggcauugaagcacacccaacccaacucgacugaagucagccucacugaaccggaucugagaaucuucucucucugggcuugccagggcucuccgaaccuagcuagcauccucuucaauuccaacuagaaagcuuaccaugcggggccugagcucccgcaagcggcgcagccacgacgugcucaccguccaguuccugauccuggggaugcuccugaugaccggcggggugacgcuggugcggaagaaccgcuggcuccugcugaacgucaccuccgaggaccucggcaagaccuucagcguggggaccggcaacugcacgaccaacauccuggaggccaaguacuggugccccgacuccauggaguacaacugcccgaaccugagcccccgggaggagcccgacgacaucgacugcuggugcuacggcguggagaacguccgcguggccuacgggaagugcgacuccgcgggccggagccgccggucccgccgggccaucgaccuccccacccacgagaaccacgggcugaagacccgccaggagaaguggaugacgggccggaugggggagcgccagcugcagaagaucgagcggugguucgugcgcaacccguucuucgccgucaccgcccucaccaucgccuaccuggugggcagcaacaugacccagcggguggucaucgcgcugcucgugcuggccgugggccccgccuacuccgcccacugcaucgggaucacggaccgcgacuucaucgagggcguccacgggggcaccugggugagcgcgacccuggagcaggacaagugcgugaccgucauggcccccgacaagcccucccucgacaucagccuggagacgguggccaucgaccggccggccgaggugcgcaaggucugcuacaacgccgugcugacccacgugaagaucaacgacaagugccccuccaccggcgaggcgcaccucgccgaggagaacgagggggacaacgccugcaagcggaccuacagcgaccggggcugggggaacggcugcgggcuguucggcaagggcuccaucgucgccugcgccaaguucacgugcgcgaaguccaugagccuguucgagguggaccagaccaagauccaguacgucauccgcgcccagcuccacgugggggccaagcaggagaacuggaacaccgacaucaagacccugaaguucgacgcccugagcggcagccaggagguggaguucaucggguacggcaaggccacgcucgagugccagguccagaccgcgguggacuucgggaacuccuacaucgccgagauggagaccgagagcuggaucguggaccggcagugggcccaggaccugacccugcccuggcaguccggcagcggcggggucuggcgcgagaugcaccaccucguggaguucgagcccccgcacgccgccacgauccgggugcuggcgcugggcaaccaggaggggucccucaagaccgcccugaccggcgccaugcgcgucaccaaggacacgaacgacaacaaccuguacaagcuccacgggggccacgugagcugccgggugaagcuguccgcccugacccucaagggcaccagcuacaagaucugcaccgacaagauguucuucgucaagaaccccacggacaccgggcacggcaccguggugaugcaggucaagguguccaagggggcgcccugccgcaucccggugaucgucgccgacgaccugaccgccgccaucaacaagggcauccuggugaccgugaacccgaucgccagcacgaacgacgacgagguccucaucgaggugaacccccccuucggcgacuccuacaucaucguggggcggggcgacagccgccugaccuaccaguggcacaaggagggguccagcaucggcaagcuguucacccagaccaugaagggggucgagcggcuggcggugaugggcgacacggccugggacuucuccagcgccggcggguucuucaccuccgugggcaaggggauccacaccgucuucggcagcgccuuccaggggcuguucggcggccucaacuggaucaccaaggugaucaugggggccgugcugaucugggucggcaucaacacgcgcaacaugaccauguccaugagcaugauccucgugggggugaucaugauguuccugagccugggcgucggggcgugaggacuaguaauaaggaaacuguaugaaugucugugggcaggaagugaagagauccuucuguaaagguuuuuggaauuaugucugcugaauaauaaacuuuuuugaaauaauaaaucugguagaaaaaugagaucuaaaaaaaaaaaaaaaaaaaaaaaaaaaaaaaaaaaaaaaaaaaaaaaaaaaaaaaaaaaaaaaaugcaucccccccccccccccccccccccccccccccaaaggcucuuuucagagccaccagaauu

SEQ ID NO: 1900 - RNA, 2504 nt, Artificial Sequence
  mRNA product Design h-4 comprising derived and/or modified sequence from YFV__NC_002031.1__SSjev(V3)-prME-XX (polyprotein: aa122-788) (opt1)
gggagagggcgcuuggcuugcaaggacccugagcugcggcauugaagcacacccaacccaacucgacugaagucagccucacugaaccggaucugagaaucuucucucucugggcuugccagggcucuccgaaccuagcuagcauccucuucaauuccaacuagaaagcuuaccaugaacgagggcagcaucauguggcuggccucccucgccguggucaucgcgugcgccggggccgugacgcuggugcggaagaaccgcuggcuccugcugaacgucaccuccgaggaccucggcaagaccuucagcguggggaccggcaacugcacgaccaacauccuggaggccaaguacuggugccccgacuccauggaguacaacugcccgaaccugagcccccgggaggagcccgacgacaucgacugcuggugcuacggcguggagaacguccgcguggccuacgggaagugcgacuccgcgggccggagccgccggucccgccgggccaucgaccuccccacccacgagaaccacgggcugaagacccgccaggagaaguggaugacgggccggaugggggagcgccagcugcagaagaucgagcggugguucgugcgcaacccguucuucgccgucaccgcccucaccaucgccuaccuggugggcagcaacaugacccagcggguggucaucgcgcugcucgugcuggccgugggccccgccuacuccgcccacugcaucgggaucacggaccgcgacuucaucgagggcguccacgggggcaccugggugagcgcgacccuggagcaggacaagugcgugaccgucauggcccccgacaagcccucccucgacaucagccuggagacgguggccaucgaccggccggccgaggugcgcaaggucugcuacaacgccgugcugacccacgugaagaucaacgacaagugccccuccaccggcgaggcgcaccucgccgaggagaacgagggggacaacgccugcaagcggaccuacagcgaccggggcugggggaacggcugcgggcuguucggcaagggcuccaucgucgccugcgccaaguucacgugcgcgaaguccaugagccuguucgagguggaccagaccaagauccaguacgucauccgcgcccagcuccacgugggggccaagcaggagaacuggaacaccgacaucaagacccugaaguucgacgcccugagcggcagccaggagguggaguucaucggguacggcaaggccacgcucgagugccagguccagaccgcgguggacuucgggaacuccuacaucgccgagauggagaccgagagcuggaucguggaccggcagugggcccaggaccugacccugcccuggcaguccggcagcggcggggucuggcgcgagaugcaccaccucguggaguucgagcccccgcacgccgccacgauccgggugcuggcgcugggcaaccaggaggggucccucaagaccgcccugaccggcgccaugcgcgucaccaaggacacgaacgacaacaaccuguacaagcuccacgggggccacgugagcugccgggugaagcuguccgcccugacccucaagggcaccagcuacaagaucugcaccgacaagauguucuucgucaagaaccccacggacaccgggcacggcaccguggugaugcaggucaagguguccaagggggcgcccugccgcaucccggugaucgucgccgacgaccugaccgccgccaucaacaagggcauccuggugaccgugaacccgaucgccagcacgaacgacgacgagguccucaucgaggugaacccccccuucggcgacuccuacaucaucguggggcggggcgacagccgccugaccuaccaguggcacaaggagggguccagcaucggcaagcuguucacccagaccaugaagggggucgagcggcuggcggugaugggcgacacggccugggacuucuccagcgccggcggguucuucaccuccgugggcaaggggauccacaccgucuucggcagcgccuuccaggggcuguucggcggccucaacuggaucaccaaggugaucaugggggccgugcugaucugggucggcaucaacacgcgcaacaugaccauguccaugagcaugauccucgugggggugaucaugauguuccugagccugggcgucggggcggaccagggcugcgccaucaacuucggcaagugaggacuaguaauaaggaaacuguaugaaugucugugggcaggaagugaagagauccuucuguaaagguuuuuggaauuaugucugcugaauaauaaacuuuuuugaaauaauaaaucugguagaaaaaugagaucuaaaaaaaaaaaaaaaaaaaaaaaaaaaaaaaaaaaaaaaaaaaaaaaaaaaaaaaaaaaaaaaaugcaucccccccccccccccccccccccccccccccaaaggcucuuuucagagccaccagaauu

SEQ ID NO: 1901 - RNA, 2513 nt, Artificial Sequence
  mRNA product Design h-4 comprising derived and/or modified sequence from YFV__NC_002031.1__X-SS-prMEdelstem_TM-JEV (polyprotein: aa92-681) (opt1)
gggagagggcgcuuggcuugcaaggacccugagcugcggcauugaagcacacccaacccaacucgacugaagucagccucacugaaccggaucugagaaucuucucucucugggcuugccagggcucuccgaaccuagcuagcauccucuucaauuccaacuagaaagcuuaccaugcggggccugagcucccgcaagcggcgcagccacgacgugcucaccguccaguuccugauccuggggaugcuccugaugaccggcggggugacgcuggugcggaagaaccgcuggcuccugcugaacgucaccuccgaggaccucggcaagaccuucagcguggggaccggcaacugcacgaccaacauccuggaggccaaguacuggugccccgacuccauggaguacaacugccccaaccugagcccccgggaggagcccgacgacaucgacugcuggugcuacggcguggagaacguccgcguggccuacgggaagugcgacuccgcgggccggagccgccggucccgccgggccaucgaccuccccacccacgagaaccacgggcugaagacccgccaggagaaguggaugacgggccggaugggggagcgccagcugcagaagaucgagcggugguucgugcgcaacccguucuucgccgucaccgcccucaccaucgccuaccuggugggcagcaacaugacccagcggguggucaucgcgcugcucgugcuggccgugggccccgccuacuccgcccacugcaucgggaucacggaccgcgacuucaucgagggcguccacgggggcaccugggugagcgcgacccuggagcaggacaagugcgugaccgucauggcccccgacaagcccucccucgacaucagccuggagacgguggccaucgaccggccggccgaggugcgcaaggucugcuacaacgccgugcugacccacgugaagaucaacgacaagugccccuccaccggcgaggcgcaccucgccgaggagaacgagggggacaacgccugcaagcggaccuacagcgaccggggcugggggaacggcugcgggcuguucggcaagggcuccaucgucgccugcgccaaguucacgugcgcgaaguccaugagccuguucgagguggaccagaccaagauccaguacgucauccgcgcccagcuccacgugggggccaagcaggagaacuggaacaccgacaucaagacccugaaguucgacgcccugagcggcagccaggagguggaguucaucggguacggcaaggccacgcucgagugccagguccagaccgcgguggacuucgggaacuccuacaucgccgagauggagaccgagagcuggaucguggaccggcagugggcccaggaccugacccugcccuggcaguccggcagcggcggggucuggcgcgagaugcaccaccucguggaguucgagcccccgcacgccgccacgauccgggugcuggcgcugggcaaccaggaggggucccucaagaccgcccugaccggcgccaugcgcgucaccaaggacacgaacgacaacaaccuguacaagcuccacgggggccacgugagcugccgggugaagcuguccgcccugacccucaagggcaccagcuacaagaucugcaccgacaagauguucuucgucaagaaccccacggacaccgggcacggcaccguggugaugcaggucaagguguccaagggggcgcccugccgcaucccggugaucgucgccgacgaccugaccgccgccaucaacaagggcauccuggugaccgugaacccgaucgccagcacgaacgacgacgagguccucaucgaggugaacccgcccuucggcgacuccuacaucaucguggggcggggcgacagccgccugaccuaccaguggcacaaggagggguccagcaucggaagcacgcugggcaaggccuuuucaacaacuuugaagggagcucaaagacuggcagcguugggcgacacagccugggacuuuggcucuauuggaggggucuucaacuccauagguagagccguucaccaaguguuuggaggugccuucagaacacucuuugggggaaugucuuggaucacacaagggcuaaugggugcccuacugcucuggaugggcgucaacgcacgagaccgaucaauugcuuuggccuucuuagccacaggaggugugcucguguucuuagcgaccaaugugcacgccugaggacuaguaauaaggaaacuguaugaaugucugugggcaggaagugaagagauccuucuguaaagguuuuuggaauuaugucugcugaauaauaaacuuuuuugaaauaauaaaucugguagaaaaaugagaucuaaaaaaaaaaaaaaaaaaaaaaaaaaaaaaaaaaaaaaaaaaaaaaaaaaaaaaaaaaaaaaaaugcaucccccccccccccccccccccccccccccccaaaggcucuuuucagagccaccagaauu

SEQ ID NO: 1902 - RNA, 2486 nt, Artificial Sequence
  mRNA product Design h-4 comprising derived and/or modified sequence from YFV__NC_002031.1__SSjev(V3)-prMEdelstem_TM-JEV (polyprotein: aa122-681) (opt1)
gggagagggcgcuuggcuugcaaggacccugagcugcggcauugaagcacacccaacccaacucgacugaagucagccucacugaaccggaucugagaaucuucucucucugggcuugccagggcucuccgaaccuagcuagcauccucuucaauuccaacuagaaagcuuaccaugaacgagggcagcaucauguggcuggccucccucgccguggucaucgcgugcgccggggccgugacgcuggugcggaagaaccgcuggcuccugcugaacgucaccuccgaggaccucggcaagaccuucagcguggggaccggcaacugcacgaccaacauccuggaggccaaguacuggugccccgacuccauggaguacaacugccccaaccugagcccccgggaggagcccgacgacaucgacugcuggugcuacggcguggagaacguccgcguggccuacgggaagugcgacuccgcgggccggagccgccggucccgccgggccaucgaccuccccacccacgagaaccacgggcugaagacccgccaggagaaguggaugacgggccggaugggggagcgccagcugcagaagaucgagcggugguucgugcgcaacccguucuucgccgucaccgcccucaccaucgccuaccuggugggcagcaacaugacccagcggguggucaucgcgcugcucgugcuggccgugggccccgccuacuccgcccacugcaucgggaucacggaccgcgacuucaucgagggcguccacgggggcaccugggugagcgcgacccuggagcaggacaagugcgugaccgucauggcccccgacaagcccucccucgacaucagccuggagacgguggccaucgaccggccggccgaggugcgcaaggucugcuacaacgccgugcugacccacgugaagaucaacgacaagugccccuccaccggcgaggcgcaccucgccgaggagaacgagggggacaacgccugcaagcggaccuacagcgaccggggcugggggaacggcugcgggcuguucggcaagggcuccaucgucgccugcgccaaguucacgugcgcgaaguccaugagccuguucgagguggaccagaccaagauccaguacgucauccgcgcccagcuccacgugggggccaagcaggagaacuggaacaccgacaucaagacccugaaguucgacgcccugagcggcagccaggagguggaguucaucggguacggcaaggccacgcucgagugccagguccagaccgcgguggacuucgggaacuccuacaucgccgagauggagaccgagagcuggaucguggaccggcagugggcccaggaccugacccugcccuggcaguccggcagcggcggggucuggcgcgagaugcaccaccucguggaguucgagcccccgcacgccgccacgauccgggugcuggcgcugggcaaccaggaggggucccucaagaccgcccugaccggcgccaugcgcgucaccaaggacacgaacgacaacaaccuguacaagcuccacgggggccacgugagcugccgggugaagcuguccgcccugacccucaagggcaccagcuacaagaucugcaccgacaagauguucuucgucaagaaccccacggacaccgggcacggcaccguggugaugcaggucaagguguccaagggggcgcccugccgcaucccggugaucgucgccgacgaccugaccgccgccaucaacaagggcauccuggugaccgugaacccgaucgccagcacgaacgacgacgagguccucaucgaggugaacccgcccuucggcgacuccuacaucaucguggggcggggcgacagccgccugaccuaccaguggcacaaggagggguccagcaucggcagcacccuggggaaggccuucuccaccacgcucaagggcgcccagcgccuggcggcccugggggacaccgccugggacuucggcagcaucgggggcguguucaacuccaucggccgggccguccaccagguguucgggggcgccuuccgcacccucuucgggggcaugagcuggaucacccaggggcugaugggcgcgcugcuccuguggaugggggugaacgcccgggaccgcuccaucgcccuggccuuccucgcgacgggcggcguccugguguuccuggccaccaacgugcacgccugaggacuaguaauaaggaaacuguaugaaugucugugggcaggaagugaagagauccuucuguaaagguuuuuggaauuaugucugcugaauaauaaacuuuuuugaaauaauaaaucugguagaaaaaugagaucuaaaaaaaaaaaaaaaaaaaaaaaaaaaaaaaaaaaaaaaaaaaaaaaaaaaaaaaaaaaaaaaaugcaucccccccccccccccccccccccccccccccaaaggcucuuuucagagccaccagaauu

SEQ ID NO: 1903 - RNA, 2501 nt, Artificial Sequence
  mRNA product Design h-4 comprising derived and/or modified sequence from YFV__NC_002031.1__X-SS-prME (polyprotein: aa92-778) (opt1)
gggagagggcgcuuggcuugcaaggacccugagcugcggcauugaagcacacccaacccaacucgacugaagucagccucacugaaccggaucugagaaucuucucucucugggcuugccagggcucuccgaaccuagcuagcauccucuucaauuccaacuagaaagcuuaccaugcggggccugagcucccgcaagcggcgcagccacgacgugcucaccguccaguuccugauccuggggaugcuccugaugaccggcggggugacgcuggugcggaagaaccgcuggcuccugcugaacgucaccuccgaggaccucggcaagaccuucagcguggggaccggcaacugcacgaccaacauccuggaggccaaguacuggugccccgacuccauggaguacaacugccccaaccugagcccccgggaggagcccgacgacaucgacugcuggugcuacggcguggagaacguccgcguggccuacgggaagugcgacuccgcgggccggagccgccggucccgccgggccaucgaccuccccacccacgagaaccacgggcugaagacccgccaggagaaguggaugacgggccggaugggggagcgccagcugcagaagaucgagcggugguucgugcgcaacccguucuucgccgucaccgcccucaccaucgccuaccuggugggcagcaacaugacccagcggguggucaucgcgcugcucgugcuggccgugggccccgccuacuccgcccacugcaucgggaucacggaccgcgacuucaucgagggcguccacgggggcaccugggugagcgcgacccuggagcaggacaagugcgugaccgucauggcccccgacaagcccucccucgacaucagccuggagacgguggccaucgaccggccggccgaggugcgcaaggucugcuacaacgccgugcugacccacgugaagaucaacgacaagugccccuccaccggcgaggcgcaccucgccgaggagaacgagggggacaacgccugcaagcggaccuacagcgaccggggcugggggaacggcugcgggcuguucggcaagggcuccaucgucgccugcgccaaguucacgugcgcgaaguccaugagccuguucgagguggaccagaccaagauccaguacgucauccgcgcccagcuccacgugggggccaagcaggagaacuggaacaccgacaucaagacccugaaguucgacgcccugagcggcagccaggagguggaguucaucggguacggcaaggccacgcucgagugccagguccagaccgcgguggacuucgggaacuccuacaucgccgagauggagaccgagagcuggaucguggaccggcagugggcccaggaccugacccugcccuggcaguccggcagcggcggggucuggcgcgagaugcaccaccucguggaguucgagcccccgcacgccgccacgauccgggugcuggcgcugggcaaccaggaggggucccucaagaccgcccugaccggcgccaugcgcgucaccaaggacacgaacgacaacaaccuguacaagcuccacgggggccacgugagcugccgggugaagcuguccgcccugacccucaagggcaccagcuacaagaucugcaccgacaagauguucuucgucaagaaccccacggacaccgggcacggcaccguggugaugcaggucaagguguccaagggggcgcccugccgcaucccggugaucgucgccgacgaccugaccgccgccaucaacaagggcauccuggugaccgugaacccgaucgccagcacgaacgacgacgagguccucaucgaggugaacccgcccuucggcgacuccuacaucaucguggggcggggcgacagccgccugaccuaccaguggcacaaggagggguccagcaucggcaagcuguucacccagaccaugaagggggucgagcggcuggcggugaugggcgacacggccugggacuucuccagcgccggcggguucuucaccuccgugggcaaggggauccacaccgucuucggcagcgccuuccaggggcuguucggcggccucaacuggaucaccaaggugaucaugggggccgugcugaucugggucggcaucaacacgcgcaacaugaccauguccaugagcaugauccucgugggggugaucaugauguuccugagccugggcgucggggcgugaggacuaguaauaaggaaacuguaugaaugucugugggcaggaagugaagagauccuucuguaaagguuuuuggaauuaugucugcugaauaauaaacuuuuuugaaauaauaaaucugguagaaaaaugagaucuaaaaaaaaaaaaaaaaaaaaaaaaaaaaaaaaaaaaaaaaaaaaaaaaaaaaaaaaaaaaaaaaugcaucccccccccccccccccccccccccccccccaaaggcucuuuucagagccaccagaauu

SEQ ID NO: 1904 - RNA, 2504 nt, Artificial Sequence
  mRNA product Design h-4 comprising derived and/or modified sequence from YFV__NC_002031.1__SSjev(V3)-prME-XX (polyprotein: aa122-788) (opt1)
gggagagggcgcuuggcuugcaaggacccugagcugcggcauugaagcacacccaacccaacucgacugaagucagccucacugaaccggaucugagaaucuucucucucugggcuugccagggcucuccgaaccuagcuagcauccucuucaauuccaacuagaaagcuuaccaugaacgagggcagcaucauguggcuggccucccucgccguggucaucgcgugcgccggggccgugacgcuggugcggaagaaccgcuggcuccugcugaacgucaccuccgaggaccucggcaagaccuucagcguggggaccggcaacugcacgaccaacauccuggaggccaaguacuggugccccgacuccauggaguacaacugccccaaccugagcccccgggaggagcccgacgacaucgacugcuggugcuacggcguggagaacguccgcguggccuacgggaagugcgacuccgcgggccggagccgccggucccgccgggccaucgaccuccccacccacgagaaccacgggcugaagacccgccaggagaaguggaugacgggccggaugggggagcgccagcugcagaagaucgagcggugguucgugcgcaacccguucuucgccgucaccgcccucaccaucgccuaccuggugggcagcaacaugacccagcggguggucaucgcgcugcucgugcuggccgugggccccgccuacuccgcccacugcaucgggaucacggaccgcgacuucaucgagggcguccacgggggcaccugggugagcgcgacccuggagcaggacaagugcgugaccgucauggcccccgacaagcccucccucgacaucagccuggagacgguggccaucgaccggccggccgaggugcgcaaggucugcuacaacgccgugcugacccacgugaagaucaacgacaagugccccuccaccggcgaggcgcaccucgccgaggagaacgagggggacaacgccugcaagcggaccuacagcgaccggggcugggggaacggcugcgggcuguucggcaagggcuccaucgucgccugcgccaaguucacgugcgcgaaguccaugagccuguucgagguggaccagaccaagauccaguacgucauccgcgcccagcuccacgugggggccaagcaggagaacuggaacaccgacaucaagacccugaaguucgacgcccugagcggcagccaggagguggaguucaucggguacggcaaggccacgcucgagugccagguccagaccgcgguggacuucgggaacuccuacaucgccgagauggagaccgagagcuggaucguggaccggcagugggcccaggaccugacccugcccuggcaguccggcagcggcggggucuggcgcgagaugcaccaccucguggaguucgagcccccgcacgccgccacgauccgggugcuggcgcugggcaaccaggaggggucccucaagaccgcccugaccggcgccaugcgcgucaccaaggacacgaacgacaacaaccuguacaagcuccacgggggccacgugagcugccgggugaagcuguccgcccugacccucaagggcaccagcuacaagaucugcaccgacaagauguucuucgucaagaaccccacggacaccgggcacggcaccguggugaugcaggucaagguguccaagggggcgcccugccgcaucccggugaucgucgccgacgaccugaccgccgccaucaacaagggcauccuggugaccgugaacccgaucgccagcacgaacgacgacgagguccucaucgaggugaacccgcccuucggcgacuccuacaucaucguggggcggggcgacagccgccugaccuaccaguggcacaaggagggguccagcaucggcaagcuguucacccagaccaugaagggggucgagcggcuggcggugaugggcgacacggccugggacuucuccagcgccggcggguucuucaccuccgugggcaaggggauccacaccgucuucggcagcgccuuccaggggcuguucggcggccucaacuggaucaccaaggugaucaugggggccgugcugaucugggucggcaucaacacgcgcaacaugaccauguccaugagcaugauccucgugggggugaucaugauguuccugagccugggcgucggggcggaccagggcugcgccaucaacuucggcaagugaggacuaguaauaaggaaacuguaugaaugucugugggcaggaagugaagagauccuucuguaaagguuuuuggaauuaugucugcugaauaauaaacuuuuuugaaauaauaaaucugguagaaaaaugagaucuaaaaaaaaaaaaaaaaaaaaaaaaaaaaaaaaaaaaaaaaaaaaaaaaaaaaaaaaaaaaaaaaugcaucccccccccccccccccccccccccccccccaaaggcucuuuucagagccaccagaauu

SEQ ID NO: 1905 - RNA, 2513 nt, Artificial Sequence
  mRNA product Design h-4 comprising derived and/or modified sequence from YFV__NC_002031.1__X-SS-prMEdelstem_TM-JEV (polyprotein: aa92-681) (opt2)
gggagagggcgcuuggcuugcaaggacccugagcugcggcauugaagcacacccaacccaacucgacugaagucagccucacugaaccggaucugagaaucuucucucucugggcuugccagggcucuccgaaccuagcuagcauccucuucaauuccaacuagaaagcuuaccaugcgcggccucuccucccgcaagcgccgcucccacgacguccucaccguccaguuccucauccucggcaugcuccucaugaccggcggcgucacccucguccgcaagaaccgcuggcuccuccucaacgucaccuccgaggaccucggcaagaccuucuccgucggcaccggcaacugcaccaccaacauccucgaggccaaguacuggugccccgacuccauggaguacaacugccccaaccucuccccccgcgaggagcccgacgacaucgacugcuggugcuacggcgucgagaacguccgcgucgccuacggcaagugcgacuccgccggccgcucccgccgcucccgccgcgccaucgaccuccccacccacgagaaccacggccucaagacccgccaggagaaguggaugaccggccgcaugggcgagcgccagcuccagaagaucgagcgcugguucguccgcaaccccuucuucgccgucaccgcccucaccaucgccuaccucgucggcuccaacaugacccagcgcgucgucaucgcccuccucguccucgccgucggccccgccuacuccgcccacugcaucggcaucaccgaccgcgacuucaucgagggcguccacggcggcaccugggucuccgccacccucgagcaggacaagugcgucaccgucauggcccccgacaagcccucccucgacaucucccucgagaccgucgccaucgaccgccccgccgagguccgcaaggucugcuacaacgccguccucacccacgucaagaucaacgacaagugccccuccaccggcgaggcccaccucgccgaggagaacgagggcgacaacgccugcaagcgcaccuacuccgaccgcggcuggggcaacggcugcggccucuucggcaagggcuccaucgucgccugcgccaaguucaccugcgccaaguccaugucccucuucgaggucgaccagaccaagauccaguacgucauccgcgcccagcuccacgucggcgccaagcaggagaacuggaacaccgacaucaagacccucaaguucgacgcccucuccggcucccaggaggucgaguucaucggcuacggcaaggccacccucgagugccagguccagaccgccgucgacuucggcaacuccuacaucgccgagauggagaccgaguccuggaucgucgaccgccagugggcccaggaccucacccuccccuggcaguccggcuccggcggcgucuggcgcgagaugcaccaccucgucgaguucgagcccccccacgccgccaccauccgcguccucgcccucggcaaccaggagggcucccucaagaccgcccucaccggcgccaugcgcgucaccaaggacaccaacgacaacaaccucuacaagcuccacggcggccacgucuccugccgcgucaagcucuccgcccucacccucaagggcaccuccuacaagaucugcaccgacaagauguucuucgucaagaaccccaccgacaccggccacggcaccgucgucaugcaggucaaggucuccaagggcgcccccugccgcauccccgucaucgucgccgacgaccucaccgccgccaucaacaagggcauccucgucaccgucaaccccaucgccuccaccaacgacgacgagguccucaucgaggucaacccccccuucggcgacuccuacaucaucgucggccgcggcgacucccgccucaccuaccaguggcacaaggagggcuccuccaucggcuccacccucggcaaggccuucuccaccacccucaagggcgcccagcgccucgccgcccucggcgacaccgccugggacuucggcuccaucggcggcgucuucaacuccaucggccgcgccguccaccaggucuucggcggcgccuuccgcacccucuucggcggcauguccuggaucacccagggccucaugggcgcccuccuccucuggaugggcgucaacgcccgcgaccgcuccaucgcccucgccuuccucgccaccggcggcguccucgucuuccucgccaccaacguccacgccugaggacuaguaauaaggaaacuguaugaaugucugugggcaggaagugaagagauccuucuguaaagguuuuuggaauuaugucugcugaauaauaaacuuuuuugaaauaauaaaucugguagaaaaaugagaucuaaaaaaaaaaaaaaaaaaaaaaaaaaaaaaaaaaaaaaaaaaaaaaaaaaaaaaaaaaaaaaaaugcaucccccccccccccccccccccccccccccccaaaggcucuuuucagagccaccagaauu

SEQ ID NO: 1906 - RNA, 2486 nt, Artificial Sequence
  mRNA product Design h-4 comprising derived and/or modified sequence from YFV__NC_002031.1__SSjev(V3)-prMEdelstem_TM-JEV (polyprotein: aa122-681) (opt2)
gggagagggcgcuuggcuugcaaggacccugagcugcggcauugaagcacacccaacccaacucgacugaagucagccucacugaaccggaucugagaaucuucucucucugggcuugccagggcucuccgaaccuagcuagcauccucuucaauuccaacuagaaagcuuaccaugaacgagggcuccaucauguggcucgccucccucgccgucgucaucgccugcgccggcgccgucacccucguccgcaagaaccgcuggcuccuccucaacgucaccuccgaggaccucggcaagaccuucuccgucggcaccggcaacugcaccaccaacauccucgaggccaaguacuggugccccgacuccauggaguacaacugccccaaccucuccccccgcgaggagcccgacgacaucgacugcuggugcuacggcgucgagaacguccgcgucgccuacggcaagugcgacuccgccggccgcucccgccgcucccgccgcgccaucgaccuccccacccacgagaaccacggccucaagacccgccaggagaaguggaugaccggccgcaugggcgagcgccagcuccagaagaucgagcgcugguucguccgcaaccccuucuucgccgucaccgcccucaccaucgccuaccucgucggcuccaacaugacccagcgcgucgucaucgcccuccucguccucgccgucggccccgccuacuccgcccacugcaucggcaucaccgaccgcgacuucaucgagggcguccacggcggcaccugggucuccgccacccucgagcaggacaagugcgucaccgucauggcccccgacaagcccucccucgacaucucccucgagaccgucgccaucgaccgccccgccgagguccgcaaggucugcuacaacgccguccucacccacgucaagaucaacgacaagugccccuccaccggcgaggcccaccucgccgaggagaacgagggcgacaacgccugcaagcgcaccuacuccgaccgcggcuggggcaacggcugcggccucuucggcaagggcuccaucgucgccugcgccaaguucaccugcgccaaguccaugucccucuucgaggucgaccagaccaagauccaguacgucauccgcgcccagcuccacgucggcgccaagcaggagaacuggaacaccgacaucaagacccucaaguucgacgcccucuccggcucccaggaggucgaguucaucggcuacggcaaggccacccucgagugccagguccagaccgccgucgacuucggcaacuccuacaucgccgagauggagaccgaguccuggaucgucgaccgccagugggcccaggaccucacccuccccuggcaguccggcuccggcggcgucuggcgcgagaugcaccaccucgucgaguucgagcccccccacgccgccaccauccgcguccucgcccucggcaaccaggagggcucccucaagaccgcccucaccggcgccaugcgcgucaccaaggacaccaacgacaacaaccucuacaagcuccacggcggccacgucuccugccgcgucaagcucuccgcccucacccucaagggcaccuccuacaagaucugcaccgacaagauguucuucgucaagaaccccaccgacaccggccacggcaccgucgucaugcaggucaaggucuccaagggcgcccccugccgcauccccgucaucgucgccgacgaccucaccgccgccaucaacaagggcauccucgucaccgucaaccccaucgccuccaccaacgacgacgagguccucaucgaggucaacccccccuucggcgacuccuacaucaucgucggccgcggcgacucccgccucaccuaccaguggcacaaggagggcuccuccaucggcuccacccucggcaaggccuucuccaccacccucaagggcgcccagcgccucgccgcccucggcgacaccgccugggacuucggcuccaucggcggcgucuucaacuccaucggccgcgccguccaccaggucuucggcggcgccuuccgcacccucuucggcggcauguccuggaucacccagggccucaugggcgcccuccuccucuggaugggcgucaacgcccgcgaccgcuccaucgcccucgccuuccucgccaccggcggcguccucgucuuccucgccaccaacguccacgccugaggacuaguaauaaggaaacuguaugaaugucugugggcaggaagugaagagauccuucuguaaagguuuuuggaauuaugucugcugaauaauaaacuuuuuugaaauaauaaaucugguagaaaaaugagaucuaaaaaaaaaaaaaaaaaaaaaaaaaaaaaaaaaaaaaaaaaaaaaaaaaaaaaaaaaaaaaaaaugcaucccccccccccccccccccccccccccccccaaaggcucuuuucagagccaccagaauu

SEQ ID NO: 1907 - RNA, 2501 nt, Artificial Sequence
  mRNA product Design h-4 comprising derived and/or modified sequence from YFV__NC_002031.1__X-SS-prME (polyprotein: aa92-778) (opt2)
gggagagggcgcuuggcuugcaaggacccugagcugcggcauugaagcacacccaacccaacucgacugaagucagccucacugaaccggaucugagaaucuucucucucugggcuugccagggcucuccgaaccuagcuagcauccucuucaauuccaacuagaaagcuuaccaugcgcggccucuccucccgcaagcgccgcucccacgacguccucaccguccaguuccucauccucggcaugcuccucaugaccggcggcgucacccucguccgcaagaaccgcuggcuccuccucaacgucaccuccgaggaccucggcaagaccuucuccgucggcaccggcaacugcaccaccaacauccucgaggccaaguacuggugccccgacuccauggaguacaacugccccaaccucuccccccgcgaggagcccgacgacaucgacugcuggugcuacggcgucgagaacguccgcgucgccuacggcaagugcgacuccgccggccgcucccgccgcucccgccgcgccaucgaccuccccacccacgagaaccacggccucaagacccgccaggagaaguggaugaccggccgcaugggcgagcgccagcuccagaagaucgagcgcugguucguccgcaaccccuucuucgccgucaccgcccucaccaucgccuaccucgucggcuccaacaugacccagcgcgucgucaucgcccuccucguccucgccgucggccccgccuacuccgcccacugcaucggcaucaccgaccgcgacuucaucgagggcguccacggcggcaccugggucuccgccacccucgagcaggacaagugcgucaccgucauggcccccgacaagcccucccucgacaucucccucgagaccgucgccaucgaccgccccgccgagguccgcaaggucugcuacaacgccguccucacccacgucaagaucaacgacaagugccccuccaccggcgaggcccaccucgccgaggagaacgagggcgacaacgccugcaagcgcaccuacuccgaccgcggcuggggcaacggcugcggccucuucggcaagggcuccaucgucgccugcgccaaguucaccugcgccaaguccaugucccucuucgaggucgaccagaccaagauccaguacgucauccgcgcccagcuccacgucggcgccaagcaggagaacuggaacaccgacaucaagacccucaaguucgacgcccucuccggcucccaggaggucgaguucaucggcuacggcaaggccacccucgagugccagguccagaccgccgucgacuucggcaacuccuacaucgccgagauggagaccgaguccuggaucgucgaccgccagugggcccaggaccucacccuccccuggcaguccggcuccggcggcgucuggcgcgagaugcaccaccucgucgaguucgagcccccccacgccgccaccauccgcguccucgcccucggcaaccaggagggcucccucaagaccgcccucaccggcgccaugcgcgucaccaaggacaccaacgacaacaaccucuacaagcuccacggcggccacgucuccugccgcgucaagcucuccgcccucacccucaagggcaccuccuacaagaucugcaccgacaagauguucuucgucaagaaccccaccgacaccggccacggcaccgucgucaugcaggucaaggucuccaagggcgcccccugccgcauccccgucaucgucgccgacgaccucaccgccgccaucaacaagggcauccucgucaccgucaaccccaucgccuccaccaacgacgacgagguccucaucgaggucaacccccccuucggcgacuccuacaucaucgucggccgcggcgacucccgccucaccuaccaguggcacaaggagggcuccuccaucggcaagcucuucacccagaccaugaagggcgucgagcgccucgccgucaugggcgacaccgccugggacuucuccuccgccggcggcuucuucaccuccgucggcaagggcauccacaccgucuucggcuccgccuuccagggccucuucggcggccucaacuggaucaccaaggucaucaugggcgccguccucaucugggucggcaucaacacccgcaacaugaccauguccauguccaugauccucgucggcgucaucaugauguuccucucccucggcgucggcgccugaggacuaguaauaaggaaacuguaugaaugucugugggcaggaagugaagagauccuucuguaaagguuuuuggaauuaugucugcugaauaauaaacuuuuuugaaauaauaaaucugguagaaaaaugagaucuaaaaaaaaaaaaaaaaaaaaaaaaaaaaaaaaaaaaaaaaaaaaaaaaaaaaaaaaaaaaaaaaugcaucccccccccccccccccccccccccccccccaaaggcucuuuucagagccaccagaauu

SEQ ID NO: 1908 - RNA, 2504 nt, Artificial Sequence
  mRNA product Design h-4 comprising derived and/or modified sequence from YFV__NC_002031.1__SSjev(V3)-prME-XX (polyprotein: aa122-788) (opt2)
gggagagggcgcuuggcuugcaaggacccugagcugcggcauugaagcacacccaacccaacucgacugaagucagccucacugaaccggaucugagaaucuucucucucugggcuugccagggcucuccgaaccuagcuagcauccucuucaauuccaacuagaaagcuuaccaugaacgagggcuccaucauguggcucgccucccucgccgucgucaucgccugcgccggcgccgucacccucguccgcaagaaccgcuggcuccuccucaacgucaccuccgaggaccucggcaagaccuucuccgucggcaccggcaacugcaccaccaacauccucgaggccaaguacuggugccccgacuccauggaguacaacugccccaaccucuccccccgcgaggagcccgacgacaucgacugcuggugcuacggcgucgagaacguccgcgucgccuacggcaagugcgacuccgccggccgcucccgccgcucccgccgcgccaucgaccuccccacccacgagaaccacggccucaagacccgccaggagaaguggaugaccggccgcaugggcgagcgccagcuccagaagaucgagcgcugguucguccgcaaccccuucuucgccgucaccgcccucaccaucgccuaccucgucggcuccaacaugacccagcgcgucgucaucgcccuccucguccucgccgucggccccgccuacuccgcccacugcaucggcaucaccgaccgcgacuucaucgagggcguccacggcggcaccugggucuccgccacccucgagcaggacaagugcgucaccgucauggcccccgacaagcccucccucgacaucucccucgagaccgucgccaucgaccgccccgccgagguccgcaaggucugcuacaacgccguccucacccacgucaagaucaacgacaagugccccuccaccggcgaggcccaccucgccgaggagaacgagggcgacaacgccugcaagcgcaccuacuccgaccgcggcuggggcaacggcugcggccucuucggcaagggcuccaucgucgccugcgccaaguucaccugcgccaaguccaugucccucuucgaggucgaccagaccaagauccaguacgucauccgcgcccagcuccacgucggcgccaagcaggagaacuggaacaccgacaucaagacccucaaguucgacgcccucuccggcucccaggaggucgaguucaucggcuacggcaaggccacccucgagugccagguccagaccgccgucgacuucggcaacuccuacaucgccgagauggagaccgaguccuggaucgucgaccgccagugggcccaggaccucacccuccccuggcaguccggcuccggcggcgucuggcgcgagaugcaccaccucgucgaguucgagcccccccacgccgccaccauccgcguccucgcccucggcaaccaggagggcucccucaagaccgcccucaccggcgccaugcgcgucaccaaggacaccaacgacaacaaccucuacaagcuccacggcggccacgucuccugccgcgucaagcucuccgcccucacccucaagggcaccuccuacaagaucugcaccgacaagauguucuucgucaagaaccccaccgacaccggccacggcaccgucgucaugcaggucaaggucuccaagggcgcccccugccgcauccccgucaucgucgccgacgaccucaccgccgccaucaacaagggcauccucgucaccgucaaccccaucgccuccaccaacgacgacgagguccucaucgaggucaacccccccuucggcgacuccuacaucaucgucggccgcggcgacucccgccucaccuaccaguggcacaaggagggcuccuccaucggcaagcucuucacccagaccaugaagggcgucgagcgccucgccgucaugggcgacaccgccugggacuucuccuccgccggcggcuucuucaccuccgucggcaagggcauccacaccgucuucggcuccgccuuccagggccucuucggcggccucaacuggaucaccaaggucaucaugggcgccguccucaucugggucggcaucaacacccgcaacaugaccauguccauguccaugauccucgucggcgucaucaugauguuccucucccucggcgucggcgccgaccagggcugcgccaucaacuucggcaagugaggacuaguaauaaggaaacuguaugaaugucugugggcaggaagugaagagauccuucuguaaagguuuuuggaauuaugucugcugaauaauaaacuuuuuugaaauaauaaaucugguagaaaaaugagaucuaaaaaaaaaaaaaaaaaaaaaaaaaaaaaaaaaaaaaaaaaaaaaaaaaaaaaaaaaaaaaaaaugcaucccccccccccccccccccccccccccccccaaaggcucuuuucagagccaccagaauu

SEQ ID NO: 1909 - RNA, 2513 nt, Artificial Sequence
  mRNA product Design h-4 comprising derived and/or modified sequence from YFV__NC_002031.1__X-SS-prMEdelstem_TM-JEV (polyprotein: aa92-681) (opt3)
gggagagggcgcuuggcuugcaaggacccugagcugcggcauugaagcacacccaacccaacucgacugaagucagccucacugaaccggaucugagaaucuucucucucugggcuugccagggcucuccgaaccuagcuagcauccucuucaauuccaacuagaaagcuuaccaugagaggccugagcuccaggaagcggcgcucucacgacgugcucaccguccaguuccuuauccuggggauguuguuaaugacaggagguguuacucuggugcguaaaaaccgauggcuacuccugaauguaacgucagaggaucuuggcaagaccuuuaguguggggacaggaaacugcacuaccaauauucuggaagccaaauacuggugucccgacagcauggaguauaacugcccuaauuuguccccaagagaggaaccggaugacauagauuguuggugcuacggcgucgaaaacgugaggguugcuuaugguaagugugacucugcagggcggucgcgcagaucaaggcgggccaucgaucuccccacacaugagaaucacggacugaaaacccgccaagagaaguggaugacuggccgaaugggcgaaagacagcugcagaagauugagaggugguucgugcggaacccuuucuucgcggucacagcucucaccaucgccuacuuaguggggagcaauaugacgcagcguguaguuauugcacugcuuguguuggccgucggaccagcuuauagugcacauugcaucgguauaacugaccgcgauuuuaucgaaggcgugcacgggggaaccuggguguccgccacacuggagcaagacaaaugugucacuguuauggcucccgauaagccuucucuagacauuagccucgagaccguggccaucgauagaccagcggaaguaaggaaagugugcuacaacgcaguccugacacaugugaagauuaaugacaaaugucccuccaccggcgaggcccaccuugcugaagagaacgaaggugacaaugccugcaagcggacguauucagaucgaggguggggaaacggcuguggccuguucgggaagggaaguaucguugcaugcgcuaaauuuacuugcgccaagagcaugucuuuguucgagguggaccagacaaaaauacaguacgucauucgcgcgcagcuccacgugggugccaagcaagagaauuggaacaccgauaucaaaacucugaaguuugacgcauuauccggcucacaggaaguagaguucauuggguacggaaaagcuacacuggaaugucagguucagaccgccguggauuuuggcaacagcuauaucgcugagauggaaacggagaguuggaucgucgacagacaaugggcccaggaucucacccuuccuuggcagucugguuccgggggcguguggagggagaugcaucaccuggucgaauuugagccaccgcaugcagccacaauucggguguuggcucuaggaaaucaagaaggcagccugaagacugcgcucaccggggcaaugcgcguuacaaaggacacuaacgauaauaaccuguacaaacuucacggaggucacgugucgugcagaguaaagcugucugccuugacccucaaaggcacauccuauaagauauguaccgacaaaauguuuuucgucaagaaucccacugauacggggcauggaacagugguuaugcaagugaaggucucaaaaggcgcuccuugcaggaucccagugauuguagccgacgaccugaccgcagccaucaacaaggguauauuagugacuguuaaucccauugcuaguaccaacgaugacgagguccugaucgaagugaauccuccauucggggauagcuacaucauugugggccguggagacucccggcuaacauaucaguggcacaaagagggcucuagcaucggcagcacccuggggaaggccuucuccacaacucucaaaggagcucagagacuugcagcccugggugacacggcgugggauuuuggcucuaucgggggaguguucaacucaauuggcagggcuguccaccaaguuuuugguggggccuuccggaccuuguuuggaggcaugaguuggauaacacagggcuuaaugggggcacugcuacucuggaugggagugaaugcccgcgaccgaagcaucgcucuggcauuccuugccacugguggcguacugguguuuuuggcuaccaacguccaugccugaggacuaguaauaaggaaacuguaugaaugucugugggcaggaagugaagagauccuucuguaaagguuuuuggaauuaugucugcugaauaauaaacuuuuuugaaauaauaaaucugguagaaaaaugagaucuaaaaaaaaaaaaaaaaaaaaaaaaaaaaaaaaaaaaaaaaaaaaaaaaaaaaaaaaaaaaaaaaugcaucccccccccccccccccccccccccccccccaaaggcucuuuucagagccaccagaauu

SEQ ID NO: 1910 - RNA, 2486 nt, Artificial Sequence
  mRNA product Design h-4 comprising derived and/or modified sequence from YFV__NC_002031.1__SSjev(V3)-prMEdelstem_TM-JEV (polyprotein: aa122-681) (opt3)
gggagagggcgcuuggcuugcaaggacccugagcugcggcauugaagcacacccaacccaacucgacugaagucagccucacugaaccggaucugagaaucuucucucucugggcuugccagggcucuccgaaccuagcuagcauccucuucaauuccaacuagaaagcuuaccaugaacgagggcagcaucauguggcuggccucccucgcuguggucauugcaugcgccggggcgguuacucuggugcguaaaaaccgauggcuacuccugaauguaacgucagaggaucuuggcaagaccuuuaguguggggacaggaaacugcacuaccaauauucuggaagccaaauacuggugucccgacagcauggaguauaacugcccuaauuuguccccaagagaggaaccggaugacauagauuguuggugcuacggcgucgaaaacgugaggguugcuuaugguaagugugacucugcagggcggucgcgcagaucaaggcgggccaucgaucuccccacacaugagaaucacggacugaaaacccgccaagagaaguggaugacuggccgaaugggcgaaagacagcugcagaagauugagaggugguucgugcggaacccuuucuucgcggucacagcucucaccaucgccuacuuaguggggagcaauaugacgcagcguguaguuauugcacugcuuguguuggccgucggaccagcuuauagugcacauugcaucgguauaacugaccgcgauuuuaucgaaggcgugcacgggggaaccuggguguccgccacacuggagcaagacaaaugugucacuguuauggcucccgauaagccuucucuagacauuagccucgagaccguggccaucgauagaccagcggaaguaaggaaagugugcuacaacgcaguccugacacaugugaagauuaaugacaaaugucccuccaccggcgaggcccaccuugcugaagagaacgaaggugacaaugccugcaagcggacguauucagaucgaggguggggaaacggcuguggccuguucgggaagggaaguaucguugcaugcgcuaaauuuacuugcgccaagagcaugucuuuguucgagguggaccagacaaaaauacaguacgucauucgcgcgcagcuccacgugggugccaagcaagagaauuggaacaccgauaucaaaacucugaaguuugacgcauuauccggcucacaggaaguagaguucauuggguacggaaaagcuacacuggaaugucagguucagaccgccguggauuuuggcaacagcuauaucgcugagauggaaacggagaguuggaucgucgacagacaaugggcccaggaucucacccuuccuuggcagucugguuccgggggcguguggagggagaugcaucaccuggucgaauuugagccaccgcaugcagccacaauucggguguuggcucuaggaaaucaagaaggcagccugaagacugcgcucaccggggcaaugcgcguuacaaaggacacuaacgauaauaaccuguacaaacuucacggaggucacgugucgugcagaguaaagcugucugccuugacccucaaaggcacauccuauaagauauguaccgacaaaauguuuuucgucaagaaucccacugauacggggcauggaacagugguuaugcaagugaaggucucaaaaggcgcuccuugcaggaucccagugauuguagccgacgaccugaccgcagccaucaacaaggguauauuagugacuguuaaucccauugcuaguaccaacgaugacgagguccugaucgaagugaauccuccauucggggauagcuacaucauugugggccguggagacucccggcuaacauaucaguggcacaaagagggcucuagcaucggcagcacccuggggaaggccuucuccacaacucucaaaggagcucagagacuugcagcccugggugacacggcgugggauuuuggcucuaucgggggaguguucaacucaauuggcagggcuguccaccaaguuuuugguggggccuuccggaccuuguuuggaggcaugaguuggauaacacagggcuuaaugggggcacugcuacucuggaugggagugaaugcccgcgaccgaagcaucgcucuggcauuccuugccacugguggcguacugguguuuuuggcuaccaacguccaugccugaggacuaguaauaaggaaacuguaugaaugucugugggcaggaagugaagagauccuucuguaaagguuuuuggaauuaugucugcugaauaauaaacuuuuuugaaauaauaaaucugguagaaaaaugagaucuaaaaaaaaaaaaaaaaaaaaaaaaaaaaaaaaaaaaaaaaaaaaaaaaaaaaaaaaaaaaaaaaugcaucccccccccccccccccccccccccccccccaaaggcucuuuucagagccaccagaauu

SEQ ID NO: 1911 - RNA, 2501 nt, Artificial Sequence
  mRNA product Design h-4 comprising derived and/or modified sequence from YFV__NC_002031.1__X-SS-prME (polyprotein: aa92-778) (opt3)
gggagagggcgcuuggcuugcaaggacccugagcugcggcauugaagcacacccaacccaacucgacugaagucagccucacugaaccggaucugagaaucuucucucucugggcuugccagggcucuccgaaccuagcuagcauccucuucaauuccaacuagaaagcuuaccaugagaggccugagcuccaggaagcggcgcucucacgacgugcucaccguccaguuccuuauccuggggauguuguuaaugacaggagguguuacucuggugcguaaaaaccgauggcuacuccugaauguaacgucagaggaucuuggcaagaccuuuaguguggggacaggaaacugcacuaccaauauucuggaagccaaauacuggugucccgacagcauggaguauaacugcccuaauuuguccccaagagaggaaccggaugacauagauuguuggugcuacggcgucgaaaacgugaggguugcuuaugguaagugugacucugcagggcggucgcgcagaucaaggcgggccaucgaucuccccacacaugagaaucacggacugaaaacccgccaagagaaguggaugacuggccgaaugggcgaaagacagcugcagaagauugagaggugguucgugcggaacccuuucuucgcggucacagcucucaccaucgccuacuuaguggggagcaauaugacgcagcguguaguuauugcacugcuuguguuggccgucggaccagcuuauagugcacauugcaucgguauaacugaccgcgauuuuaucgaaggcgugcacgggggaaccuggguguccgccacacuggagcaagacaaaugugucacuguuauggcucccgauaagccuucucuagacauuagccucgagaccguggccaucgauagaccagcggaaguaaggaaagugugcuacaacgcaguccugacacaugugaagauuaaugacaaaugucccuccaccggcgaggcccaccuugcugaagagaacgaaggugacaaugccugcaagcggacguauucagaucgaggguggggaaacggcuguggccuguucgggaagggaaguaucguugcaugcgcuaaauuuacuugcgccaagagcaugucuuuguucgagguggaccagacaaaaauacaguacgucauucgcgcgcagcuccacgugggugccaagcaagagaauuggaacaccgauaucaaaacucugaaguuugacgcauuauccggcucacaggaaguagaguucauuggguacggaaaagcuacacuggaaugucagguucagaccgccguggauuuuggcaacagcuauaucgcugagauggaaacggagaguuggaucgucgacagacaaugggcccaggaucucacccuuccuuggcagucugguuccgggggcguguggagggagaugcaucaccuggucgaauuugagccaccgcaugcagccacaauucggguguuggcucuaggaaaucaagaaggcagccugaagacugcgcucaccggggcaaugcgcguuacaaaggacacuaacgauaauaaccuguacaaacuucacggaggucacgugucgugcagaguaaagcugucugccuugacccucaaaggcacauccuauaagauauguaccgacaaaauguuuuucgucaagaaucccacugauacggggcauggaacagugguuaugcaagugaaggucucaaaaggcgcuccuugcaggaucccagugauuguagccgacgaccugaccgcagccaucaacaaggguauauuagugacuguuaaucccauugcuaguaccaacgaugacgagguccugaucgaagugaauccuccauucggggauagcuacaucauugugggccguggagacucccggcuaacauaucaguggcacaaagagggcucuagcaucgggaagcucuuuacccagacuaugaaaggagucgagcgacuggccguuaugggugauacagcaugggacuucucaagugcgggcggguuuuucacguccgugggaaagggcauucauaccguguuugguagcgcuuuccaggggcuuuuuggcggauugaacuggauaacuaagguaaucaugggcgccguccugauuuggguggggaucaauacaagaaacaugaccaugucuaugucaaugauccucguuggagugauuaugauguuccugagucuuggcgucggugcaugaggacuaguaauaaggaaacuguaugaaugucugugggcaggaagugaagagauccuucuguaaagguuuuuggaauuaugucugcugaauaauaaacuuuuuugaaauaauaaaucugguagaaaaaugagaucuaaaaaaaaaaaaaaaaaaaaaaaaaaaaaaaaaaaaaaaaaaaaaaaaaaaaaaaaaaaaaaaaugcaucccccccccccccccccccccccccccccccaaaggcucuuuucagagccaccagaauu

SEQ ID NO: 1912 - RNA, 2504 nt, Artificial Sequence
  mRNA product Design h-4 comprising derived and/or modified sequence from YFV__NC_002031.1__SSjev(V3)-prME-XX (polyprotein: aa122-788) (opt3)
gggagagggcgcuuggcuugcaaggacccugagcugcggcauugaagcacacccaacccaacucgacugaagucagccucacugaaccggaucugagaaucuucucucucugggcuugccagggcucuccgaaccuagcuagcauccucuucaauuccaacuagaaagcuuaccaugaacgagggcagcaucauguggcuggccucccucgcuguggucauugcaugcgccggggcgguuacucuggugcguaaaaaccgauggcuacuccugaauguaacgucagaggaucuuggcaagaccuuuaguguggggacaggaaacugcacuaccaauauucuggaagccaaauacuggugucccgacagcauggaguauaacugcccuaauuuguccccaagagaggaaccggaugacauagauuguuggugcuacggcgucgaaaacgugaggguugcuuaugguaagugugacucugcagggcggucgcgcagaucaaggcgggccaucgaucuccccacacaugagaaucacggacugaaaacccgccaagagaaguggaugacuggccgaaugggcgaaagacagcugcagaagauugagaggugguucgugcggaacccuuucuucgcggucacagcucucaccaucgccuacuuaguggggagcaauaugacgcagcguguaguuauugcacugcuuguguuggccgucggaccagcuuauagugcacauugcaucgguauaacugaccgcgauuuuaucgaaggcgugcacgggggaaccuggguguccgccacacuggagcaagacaaaugugucacuguuauggcucccgauaagccuucucuagacauuagccucgagaccguggccaucgauagaccagcggaaguaaggaaagugugcuacaacgcaguccugacacaugugaagauuaaugacaaaugucccuccaccggcgaggcccaccuugcugaagagaacgaaggugacaaugccugcaagcggacguauucagaucgaggguggggaaacggcuguggccuguucgggaagggaaguaucguugcaugcgcuaaauuuacuugcgccaagagcaugucuuuguucgagguggaccagacaaaaauacaguacgucauucgcgcgcagcuccacgugggugccaagcaagagaauuggaacaccgauaucaaaacucugaaguuugacgcauuauccggcucacaggaaguagaguucauuggguacggaaaagcuacacuggaaugucagguucagaccgccguggauuuuggcaacagcuauaucgcugagauggaaacggagaguuggaucgucgacagacaaugggcccaggaucucacccuuccuuggcagucugguuccgggggcguguggagggagaugcaucaccuggucgaauuugagccaccgcaugcagccacaauucggguguuggcucuaggaaaucaagaaggcagccugaagacugcgcucaccggggcaaugcgcguuacaaaggacacuaacgauaauaaccuguacaaacuucacggaggucacgugucgugcagaguaaagcugucugccuugacccucaaaggcacauccuauaagauauguaccgacaaaauguuuuucgucaagaaucccacugauacggggcauggaacagugguuaugcaagugaaggucucaaaaggcgcuccuugcaggaucccagugauuguagccgacgaccugaccgcagccaucaacaaggguauauuagugacuguuaaucccauugcuaguaccaacgaugacgagguccugaucgaagugaauccuccauucggggauagcuacaucauugugggccguggagacucccggcuaacauaucaguggcacaaagagggcucuagcaucgggaagcucuuuacccagacuaugaaaggagucgagcgacuggccguuaugggugauacagcaugggacuucucaagugcgggcggguuuuucacguccgugggaaagggcauucauaccguguuugguagcgcuuuccaggggcuuuuuggcggauugaacuggauaacuaagguaaucaugggcgccguccugauuuggguggggaucaauacaagaaacaugaccaugucuaugucaaugauccucguuggagugauuaugauguuccugagucuuggcgucggugcagaucaggggugugccauaaauuuuggaaaaugaggacuaguaauaaggaaacuguaugaaugucugugggcaggaagugaagagauccuucuguaaagguuuuuggaauuaugucugcugaauaauaaacuuuuuugaaauaauaaaucugguagaaaaaugagaucuaaaaaaaaaaaaaaaaaaaaaaaaaaaaaaaaaaaaaaaaaaaaaaaaaaaaaaaaaaaaaaaaugcaucccccccccccccccccccccccccccccccaaaggcucuuuucagagccaccagaauu

SEQ ID NO: 1913 - RNA, 2513 nt, Artificial Sequence
  mRNA product Design h-4 comprising derived and/or modified sequence from YFV__NC_002031.1__X-SS-prMEdelstem_TM-JEV (polyprotein: aa92-681) (opt4)
gggagagggcgcuuggcuugcaaggacccugagcugcggcauugaagcacacccaacccaacucgacugaagucagccucacugaaccggaucugagaaucuucucucucugggcuugccagggcucuccgaaccuagcuagcauccucuucaauuccaacuagaaagcuuaccaugagaggccugagcagcagaaagagaagaagccacgacgugcugaccgugcaguuccugauccugggcaugcugcugaugaccggcggcgugacccuggugagaaagaacagauggcugcugcugaacgugaccagcgaggaccugggcaagaccuucagcgugggcaccggcaacugcaccaccaacauccuggaggccaaguacuggugccccgacagcauggaguacaacugccccaaccugagccccagagaggagcccgacgacaucgacugcuggugcuacggcguggagaacgugagaguggccuacggcaagugcgacagcgccggcagaagcagaagaagcagaagagccaucgaccugcccacccacgagaaccacggccugaagaccagacaggagaaguggaugaccggcagaaugggcgagagacagcugcagaagaucgagagaugguucgugagaaaccccuucuucgccgugaccgcccugaccaucgccuaccuggugggcagcaacaugacccagagaguggugaucgcccugcuggugcuggccgugggccccgccuacagcgcccacugcaucggcaucaccgacagagacuucaucgagggcgugcacggcggcaccugggugagcgccacccuggagcaggacaagugcgugaccgugauggcccccgacaagcccagccuggacaucagccuggagaccguggccaucgacagacccgccgaggugagaaaggugugcuacaacgccgugcugacccacgugaagaucaacgacaagugccccagcaccggcgaggcccaccuggccgaggagaacgagggcgacaacgccugcaagagaaccuacagcgacagaggcuggggcaacggcugcggccuguucggcaagggcagcaucguggccugcgccaaguucaccugcgccaagagcaugagccuguucgagguggaccagaccaagauccaguacgugaucagagcccagcugcacgugggcgccaagcaggagaacuggaacaccgacaucaagacccugaaguucgacgcccugagcggcagccaggagguggaguucaucggcuacggcaaggccacccuggagugccaggugcagaccgccguggacuucggcaacagcuacaucgccgagauggagaccgagagcuggaucguggacagacagugggcccaggaccugacccugcccuggcagagcggcagcggcggcguguggagagagaugcaccaccugguggaguucgagcccccccacgccgccaccaucagagugcuggcccugggcaaccaggagggcagccugaagaccgcccugaccggcgccaugagagugaccaaggacaccaacgacaacaaccuguacaagcugcacggcggccacgugagcugcagagugaagcugagcgcccugacccugaagggcaccagcuacaagaucugcaccgacaagauguucuucgugaagaaccccaccgacaccggccacggcaccguggugaugcaggugaaggugagcaagggcgcccccugcagaauccccgugaucguggccgacgaccugaccgccgccaucaacaagggcauccuggugaccgugaaccccaucgccagcaccaacgacgacgaggugcugaucgaggugaacccccccuucggcgacagcuacaucaucgugggcagaggcgacagcagacugaccuaccaguggcacaaggagggcagcagcaucggcagcacccugggcaaggccuucagcaccacccugaagggcgcccagagacuggccgcccugggcgacaccgccugggacuucggcagcaucggcggcguguucaacagcaucggcagagccgugcaccagguguucggcggcgccuucagaacccuguucggcggcaugagcuggaucacccagggccugaugggcgcccugcugcuguggaugggcgugaacgccagagacagaagcaucgcccuggccuuccuggccaccggcggcgugcugguguuccuggccaccaacgugcacgccugaggacuaguaauaaggaaacuguaugaaugucugugggcaggaagugaagagauccuucuguaaagguuuuuggaauuaugucugcugaauaauaaacuuuuuugaaauaauaaaucugguagaaaaaugagaucuaaaaaaaaaaaaaaaaaaaaaaaaaaaaaaaaaaaaaaaaaaaaaaaaaaaaaaaaaaaaaaaaugcaucccccccccccccccccccccccccccccccaaaggcucuuuucagagccaccagaauu

SEQ ID NO: 1914 - RNA, 2486 nt, Artificial Sequence
  mRNA product Design h-4 comprising derived and/or modified sequence from YFV__NC_002031.1__SSjev(V3)-prMEdelstem_TM-JEV (polyprotein: aa122-681) (opt4)
gggagagggcgcuuggcuugcaaggacccugagcugcggcauugaagcacacccaacccaacucgacugaagucagccucacugaaccggaucugagaaucuucucucucugggcuugccagggcucuccgaaccuagcuagcauccucuucaauuccaacuagaaagcuuaccaugaacgagggcagcaucauguggcuggccagccuggccguggugaucgccugcgccggcgccgugacccuggugagaaagaacagauggcugcugcugaacgugaccagcgaggaccugggcaagaccuucagcgugggcaccggcaacugcaccaccaacauccuggaggccaaguacuggugccccgacagcauggaguacaacugccccaaccugagccccagagaggagcccgacgacaucgacugcuggugcuacggcguggagaacgugagaguggccuacggcaagugcgacagcgccggcagaagcagaagaagcagaagagccaucgaccugcccacccacgagaaccacggccugaagaccagacaggagaaguggaugaccggcagaaugggcgagagacagcugcagaagaucgagagaugguucgugagaaaccccuucuucgccgugaccgcccugaccaucgccuaccuggugggcagcaacaugacccagagaguggugaucgcccugcuggugcuggccgugggccccgccuacagcgcccacugcaucggcaucaccgacagagacuucaucgagggcgugcacggcggcaccugggugagcgccacccuggagcaggacaagugcgugaccgugauggcccccgacaagcccagccuggacaucagccuggagaccguggccaucgacagacccgccgaggugagaaaggugugcuacaacgccgugcugacccacgugaagaucaacgacaagugccccagcaccggcgaggcccaccuggccgaggagaacgagggcgacaacgccugcaagagaaccuacagcgacagaggcuggggcaacggcugcggccuguucggcaagggcagcaucguggccugcgccaaguucaccugcgccaagagcaugagccuguucgagguggaccagaccaagauccaguacgugaucagagcccagcugcacgugggcgccaagcaggagaacuggaacaccgacaucaagacccugaaguucgacgcccugagcggcagccaggagguggaguucaucggcuacggcaaggccacccuggagugccaggugcagaccgccguggacuucggcaacagcuacaucgccgagauggagaccgagagcuggaucguggacagacagugggcccaggaccugacccugcccuggcagagcggcagcggcggcguguggagagagaugcaccaccugguggaguucgagcccccccacgccgccaccaucagagugcuggcccugggcaaccaggagggcagccugaagaccgcccugaccggcgccaugagagugaccaaggacaccaacgacaacaaccuguacaagcugcacggcggccacgugagcugcagagugaagcugagcgcccugacccugaagggcaccagcuacaagaucugcaccgacaagauguucuucgugaagaaccccaccgacaccggccacggcaccguggugaugcaggugaaggugagcaagggcgcccccugcagaauccccgugaucguggccgacgaccugaccgccgccaucaacaagggcauccuggugaccgugaaccccaucgccagcaccaacgacgacgaggugcugaucgaggugaacccccccuucggcgacagcuacaucaucgugggcagaggcgacagcagacugaccuaccaguggcacaaggagggcagcagcaucggcagcacccugggcaaggccuucagcaccacccugaagggcgcccagagacuggccgcccugggcgacaccgccugggacuucggcagcaucggcggcguguucaacagcaucggcagagccgugcaccagguguucggcggcgccuucagaacccuguucggcggcaugagcuggaucacccagggccugaugggcgcccugcugcuguggaugggcgugaacgccagagacagaagcaucgcccuggccuuccuggccaccggcggcgugcugguguuccuggccaccaacgugcacgccugaggacuaguaauaaggaaacuguaugaaugucugugggcaggaagugaagagauccuucuguaaagguuuuuggaauuaugucugcugaauaauaaacuuuuuugaaauaauaaaucugguagaaaaaugagaucuaaaaaaaaaaaaaaaaaaaaaaaaaaaaaaaaaaaaaaaaaaaaaaaaaaaaaaaaaaaaaaaaugcaucccccccccccccccccccccccccccccccaaaggcucuuuucagagccaccagaauu

SEQ ID NO: 1915 - RNA, 2501 nt, Artificial Sequence
  mRNA product Design h-4 comprising derived and/or modified sequence from YFV__NC_002031.1__X-SS-prME (polyprotein: aa92-778) (opt4)
gggagagggcgcuuggcuugcaaggacccugagcugcggcauugaagcacacccaacccaacucgacugaagucagccucacugaaccggaucugagaaucuucucucucugggcuugccagggcucuccgaaccuagcuagcauccucuucaauuccaacuagaaagcuuaccaugagaggccugagcagcagaaagagaagaagccacgacgugcugaccgugcaguuccugauccugggcaugcugcugaugaccggcggcgugacccuggugagaaagaacagauggcugcugcugaacgugaccagcgaggaccugggcaagaccuucagcgugggcaccggcaacugcaccaccaacauccuggaggccaaguacuggugccccgacagcauggaguacaacugccccaaccugagccccagagaggagcccgacgacaucgacugcuggugcuacggcguggagaacgugagaguggccuacggcaagugcgacagcgccggcagaagcagaagaagcagaagagccaucgaccugcccacccacgagaaccacggccugaagaccagacaggagaaguggaugaccggcagaaugggcgagagacagcugcagaagaucgagagaugguucgugagaaaccccuucuucgccgugaccgcccugaccaucgccuaccuggugggcagcaacaugacccagagaguggugaucgcccugcuggugcuggccgugggccccgccuacagcgcccacugcaucggcaucaccgacagagacuucaucgagggcgugcacggcggcaccugggugagcgccacccuggagcaggacaagugcgugaccgugauggcccccgacaagcccagccuggacaucagccuggagaccguggccaucgacagacccgccgaggugagaaaggugugcuacaacgccgugcugacccacgugaagaucaacgacaagugccccagcaccggcgaggcccaccuggccgaggagaacgagggcgacaacgccugcaagagaaccuacagcgacagaggcuggggcaacggcugcggccuguucggcaagggcagcaucguggccugcgccaaguucaccugcgccaagagcaugagccuguucgagguggaccagaccaagauccaguacgugaucagagcccagcugcacgugggcgccaagcaggagaacuggaacaccgacaucaagacccugaaguucgacgcccugagcggcagccaggagguggaguucaucggcuacggcaaggccacccuggagugccaggugcagaccgccguggacuucggcaacagcuacaucgccgagauggagaccgagagcuggaucguggacagacagugggcccaggaccugacccugcccuggcagagcggcagcggcggcguguggagagagaugcaccaccugguggaguucgagcccccccacgccgccaccaucagagugcuggcccugggcaaccaggagggcagccugaagaccgcccugaccggcgccaugagagugaccaaggacaccaacgacaacaaccuguacaagcugcacggcggccacgugagcugcagagugaagcugagcgcccugacccugaagggcaccagcuacaagaucugcaccgacaagauguucuucgugaagaaccccaccgacaccggccacggcaccguggugaugcaggugaaggugagcaagggcgcccccugcagaauccccgugaucguggccgacgaccugaccgccgccaucaacaagggcauccuggugaccgugaaccccaucgccagcaccaacgacgacgaggugcugaucgaggugaacccccccuucggcgacagcuacaucaucgugggcagaggcgacagcagacugaccuaccaguggcacaaggagggcagcagcaucggcaagcuguucacccagaccaugaagggcguggagagacuggccgugaugggcgacaccgccugggacuucagcagcgccggcggcuucuucaccagcgugggcaagggcauccacaccguguucggcagcgccuuccagggccuguucggcggccugaacuggaucaccaaggugaucaugggcgccgugcugaucugggugggcaucaacaccagaaacaugaccaugagcaugagcaugauccuggugggcgugaucaugauguuccugagccugggcgugggcgccugaggacuaguaauaaggaaacuguaugaaugucugugggcaggaagugaagagauccuucuguaaagguuuuuggaauuaugucugcugaauaauaaacuuuuuugaaauaauaaaucugguagaaaaaugagaucuaaaaaaaaaaaaaaaaaaaaaaaaaaaaaaaaaaaaaaaaaaaaaaaaaaaaaaaaaaaaaaaaugcaucccccccccccccccccccccccccccccccaaaggcucuuuucagagccaccagaauu

SEQ ID NO: 1916 - RNA, 2504 nt, Artificial Sequence
  mRNA product Design h-4 comprising derived and/or modified sequence from YFV__NC_002031.1__SSjev(V3)-prME-XX (polyprotein: aa122-788) (opt4)
gggagagggcgcuuggcuugcaaggacccugagcugcggcauugaagcacacccaacccaacucgacugaagucagccucacugaaccggaucugagaaucuucucucucugggcuugccagggcucuccgaaccuagcuagcauccucuucaauuccaacuagaaagcuuaccaugaacgagggcagcaucauguggcuggccagccuggccguggugaucgccugcgccggcgccgugacccuggugagaaagaacagauggcugcugcugaacgugaccagcgaggaccugggcaagaccuucagcgugggcaccggcaacugcaccaccaacauccuggaggccaaguacuggugccccgacagcauggaguacaacugccccaaccugagccccagagaggagcccgacgacaucgacugcuggugcuacggcguggagaacgugagaguggccuacggcaagugcgacagcgccggcagaagcagaagaagcagaagagccaucgaccugcccacccacgagaaccacggccugaagaccagacaggagaaguggaugaccggcagaaugggcgagagacagcugcagaagaucgagagaugguucgugagaaaccccuucuucgccgugaccgcccugaccaucgccuaccuggugggcagcaacaugacccagagaguggugaucgcccugcuggugcuggccgugggccccgccuacagcgcccacugcaucggcaucaccgacagagacuucaucgagggcgugcacggcggcaccugggugagcgccacccuggagcaggacaagugcgugaccgugauggcccccgacaagcccagccuggacaucagccuggagaccguggccaucgacagacccgccgaggugagaaaggugugcuacaacgccgugcugacccacgugaagaucaacgacaagugccccagcaccggcgaggcccaccuggccgaggagaacgagggcgacaacgccugcaagagaaccuacagcgacagaggcuggggcaacggcugcggccuguucggcaagggcagcaucguggccugcgccaaguucaccugcgccaagagcaugagccuguucgagguggaccagaccaagauccaguacgugaucagagcccagcugcacgugggcgccaagcaggagaacuggaacaccgacaucaagacccugaaguucgacgcccugagcggcagccaggagguggaguucaucggcuacggcaaggccacccuggagugccaggugcagaccgccguggacuucggcaacagcuacaucgccgagauggagaccgagagcuggaucguggacagacagugggcccaggaccugacccugcccuggcagagcggcagcggcggcguguggagagagaugcaccaccugguggaguucgagcccccccacgccgccaccaucagagugcuggcccugggcaaccaggagggcagccugaagaccgcccugaccggcgccaugagagugaccaaggacaccaacgacaacaaccuguacaagcugcacggcggccacgugagcugcagagugaagcugagcgcccugacccugaagggcaccagcuacaagaucugcaccgacaagauguucuucgugaagaaccccaccgacaccggccacggcaccguggugaugcaggugaaggugagcaagggcgcccccugcagaauccccgugaucguggccgacgaccugaccgccgccaucaacaagggcauccuggugaccgugaaccccaucgccagcaccaacgacgacgaggugcugaucgaggugaacccccccuucggcgacagcuacaucaucgugggcagaggcgacagcagacugaccuaccaguggcacaaggagggcagcagcaucggcaagcuguucacccagaccaugaagggcguggagagacuggccgugaugggcgacaccgccugggacuucagcagcgccggcggcuucuucaccagcgugggcaagggcauccacaccguguucggcagcgccuuccagggccuguucggcggccugaacuggaucaccaaggugaucaugggcgccgugcugaucugggugggcaucaacaccagaaacaugaccaugagcaugagcaugauccuggugggcgugaucaugauguuccugagccugggcgugggcgccgaccagggcugcgccaucaacuucggcaagugaggacuaguaauaaggaaacuguaugaaugucugugggcaggaagugaagagauccuucuguaaagguuuuuggaauuaugucugcugaauaauaaacuuuuuugaaauaauaaaucugguagaaaaaugagaucuaaaaaaaaaaaaaaaaaaaaaaaaaaaaaaaaaaaaaaaaaaaaaaaaaaaaaaaaaaaaaaaaugcaucccccccccccccccccccccccccccccccaaaggcucuuuucagagccaccagaauu

SEQ ID NO: 1917 - RNA, 2513 nt, Artificial Sequence
  mRNA product Design h-4 comprising derived and/or modified sequence from YFV__NC_002031.1__X-SS-prMEdelstem_TM-JEV (polyprotein: aa92-681) (opt5)
gggagagggcgcuuggcuugcaaggacccugagcugcggcauugaagcacacccaacccaacucgacugaagucagccucacugaaccggaucugagaaucuucucucucugggcuugccagggcucuccgaaccuagcuagcauccucuucaauuccaacuagaaagcuuaccaugagaggccugagcucccggaagcgcagaucucacgacgugcucaccguccaguuccugauccuugggaugcugcucaugacaggaggcguuacgcuggugcggaaaaaccgcuggcuucugcucaaugugaccagcgaggaucuggggaagacauuuuccgucggaaccggcaacugcacaaccaauauucuggaagccaaauacuggugucccgacucuauggaguauaacugcccuaaucucagcccgagagaagaacccgaugacaucgauuguuggugcuacgggguggaaaacguucggguggcuuauggaaagugugacuccgccggccgcucuagacggagccgcagagcgauugaucugccuacacaugagaaucacggccuuaaaacccggcaagagaaguggaugacggggcgcaugggagaaagacagcugcagaagaucgagcggugguucguccgcaaccccuuuuucgcugugaccgcccucacaauugccuaccugguuggcuccaauaugacccagagaguggucaucgcccuucuggugcucgcuguggggccugcuuauagcgcccauugcaucggaauuacagaccgggauuuuaucgaaggcguccacgggggaaccuggguuucugcgacgcuggagcaagacaaaugugugacagugauggcccccgauaagccuucccuggacauuagccucgagaccgucgcuaucgauagaccggccgaagugcgcaaaguuugcuacaacgcugugcugacacaugucaagauuaaugacaaaugucccucuaccggcgaggcccaccuugcggaagagaacgaaggcgacaaugccugcaagcggaccuauuccgauagaggguggggaaacggcugugggcuguucggaaagggcagcaucguggcuugcgccaaauuuacaugcgcuaagucuaugucccucuucgagguugaccagacgaaaauucaguacgugauccgcgcccagcugcacgucggggccaagcaagagaauuggaacaccgauaucaaaacacuuaaguuugacgcucugagcggaucccaggaaguggaguucauuggcuacggcaaagcgacccucgaaugucagguccagacagccguggauuuugggaacucuuauaucgcugagauggaaaccgagagcuggauuguugaccggcaaugggcccaggaucugacgcugccuuggcaguccggaagcggcgggguguggagagagaugcaucaccucgucgaguucgagcccccucaugccgcuacaauccgcgugcuggcccuuggaaaucaagaaggcucucugaagaccgcgcucaccggggcuaugcggguuacaaaggacaccaacgauaauaaccuguacaaacuucacggcggacacguguccugcagagucaagcugagcgcccucacacugaaaggcacgucuuauaagauuuguaccgacaaaauguuuuucgugaagaaucccacagauaccgggcauggaacagugguuaugcaggucaaggugagcaaaggcgccccgugccgcaucccugugaucgucgcugacgaccugaccgccgcuauuaacaaggggauccucgugacgguuaaucccauugccuccaccaacgaugacgaggugcugaucgaagucaauccucccuucggagauucuuacauuaucgugggccggggagacagcagacuuacauaucaguggcacaaagagggcuccagcaucggcagcacccuggggaaggccuucuccacaacgcucaaaggagcucagagacuggccgcgcuuggcgacaccgcuugggauuuugggucuaucggaggcguguucaacagcauugggcgggccguccaccaaguuuuuggaggcgccuuccgcacacuguuuggcgggauguccuggaucacccagggacucaugggcgcucugcuucuguggaugggggugaaugccagagaccggucuauugcucucgccuuccuggcgacaggaggcgugcuggucuuucucgccaccaacgugcaugcuugaggacuaguaauaaggaaacuguaugaaugucugugggcaggaagugaagagauccuucuguaaagguuuuuggaauuaugucugcugaauaauaaacuuuuuugaaauaauaaaucugguagaaaaaugagaucuaaaaaaaaaaaaaaaaaaaaaaaaaaaaaaaaaaaaaaaaaaaaaaaaaaaaaaaaaaaaaaaaugcaucccccccccccccccccccccccccccccccaaaggcucuuuucagagccaccagaauu

SEQ ID NO: 1918 - RNA, 2486 nt, Artificial Sequence
  mRNA product Design h-4 comprising derived and/or modified sequence from YFV__NC_002031.1__SSjev(V3)-prMEdelstem_TM-JEV (polyprotein: aa122-681) (opt5)
gggagagggcgcuuggcuugcaaggacccugagcugcggcauugaagcacacccaacccaacucgacugaagucagccucacugaaccggaucugagaaucuucucucucugggcuugccagggcucuccgaaccuagcuagcauccucuucaauuccaacuagaaagcuuaccaugaacgagggcagcaucauguggcuggccucccucgcuguggucauugccugcgcgggggcuguuacgcuggugcggaaaaaccgcuggcuucugcucaaugugaccagcgaggaucuggggaagacauuuuccgucggaaccggcaacugcacaaccaauauucuggaagccaaauacuggugucccgacucuauggaguauaacugcccuaaucucagcccgagagaagaacccgaugacaucgauuguuggugcuacgggguggaaaacguucggguggcuuauggaaagugugacuccgccggccgcucuagacggagccgcagagcgauugaucugccuacacaugagaaucacggccuuaaaacccggcaagagaaguggaugacggggcgcaugggagaaagacagcugcagaagaucgagcggugguucguccgcaaccccuuuuucgcugugaccgcccucacaauugccuaccugguuggcuccaauaugacccagagaguggucaucgcccuucuggugcucgcuguggggccugcuuauagcgcccauugcaucggaauuacagaccgggauuuuaucgaaggcguccacgggggaaccuggguuucugcgacgcuggagcaagacaaaugugugacagugauggcccccgauaagccuucccuggacauuagccucgagaccgucgcuaucgauagaccggccgaagugcgcaaaguuugcuacaacgcugugcugacacaugucaagauuaaugacaaaugucccucuaccggcgaggcccaccuugcggaagagaacgaaggcgacaaugccugcaagcggaccuauuccgauagaggguggggaaacggcugugggcuguucggaaagggcagcaucguggcuugcgccaaauuuacaugcgcuaagucuaugucccucuucgagguugaccagacgaaaauucaguacgugauccgcgcccagcugcacgucggggccaagcaagagaauuggaacaccgauaucaaaacacuuaaguuugacgcucugagcggaucccaggaaguggaguucauuggcuacggcaaagcgacccucgaaugucagguccagacagccguggauuuugggaacucuuauaucgcugagauggaaaccgagagcuggauuguugaccggcaaugggcccaggaucugacgcugccuuggcaguccggaagcggcgggguguggagagagaugcaucaccucgucgaguucgagcccccucaugccgcuacaauccgcgugcuggcccuuggaaaucaagaaggcucucugaagaccgcgcucaccggggcuaugcggguuacaaaggacaccaacgauaauaaccuguacaaacuucacggcggacacguguccugcagagucaagcugagcgcccucacacugaaaggcacgucuuauaagauuuguaccgacaaaauguuuuucgugaagaaucccacagauaccgggcauggaacagugguuaugcaggucaaggugagcaaaggcgccccgugccgcaucccugugaucgucgcugacgaccugaccgccgcuauuaacaaggggauccucgugacgguuaaucccauugccuccaccaacgaugacgaggugcugaucgaagucaauccucccuucggagauucuuacauuaucgugggccggggagacagcagacuuacauaucaguggcacaaagagggcuccagcaucggcagcacccuggggaaggccuucuccacaacgcucaaaggagcucagagacuggccgcgcuuggcgacaccgcuugggauuuugggucuaucggaggcguguucaacagcauugggcgggccguccaccaaguuuuuggaggcgccuuccgcacacuguuuggcgggauguccuggaucacccagggacucaugggcgcucugcuucuguggaugggggugaaugccagagaccggucuauugcucucgccuuccuggcgacaggaggcgugcuggucuuucucgccaccaacgugcaugcuugaggacuaguaauaaggaaacuguaugaaugucugugggcaggaagugaagagauccuucuguaaagguuuuuggaauuaugucugcugaauaauaaacuuuuuugaaauaauaaaucugguagaaaaaugagaucuaaaaaaaaaaaaaaaaaaaaaaaaaaaaaaaaaaaaaaaaaaaaaaaaaaaaaaaaaaaaaaaaugcaucccccccccccccccccccccccccccccccaaaggcucuuuucagagccaccagaauu

SEQ ID NO: 1919 - RNA, 2501 nt, Artificial Sequence
  mRNA product Design h-4 comprising derived and/or modified sequence from YFV__NC_002031.1__X-SS-prME (polyprotein: aa92-778) (opt5)
gggagagggcgcuuggcuugcaaggacccugagcugcggcauugaagcacacccaacccaacucgacugaagucagccucacugaaccggaucugagaaucuucucucucugggcuugccagggcucuccgaaccuagcuagcauccucuucaauuccaacuagaaagcuuaccaugagaggccugagcucccggaagcgcagaucucacgacgugcucaccguccaguuccugauccuugggaugcugcucaugacaggaggcguuacgcuggugcggaaaaaccgcuggcuucugcucaaugugaccagcgaggaucuggggaagacauuuuccgucggaaccggcaacugcacaaccaauauucuggaagccaaauacuggugucccgacucuauggaguauaacugcccuaaucucagcccgagagaagaacccgaugacaucgauuguuggugcuacgggguggaaaacguucggguggcuuauggaaagugugacuccgccggccgcucuagacggagccgcagagcgauugaucugccuacacaugagaaucacggccuuaaaacccggcaagagaaguggaugacggggcgcaugggagaaagacagcugcagaagaucgagcggugguucguccgcaaccccuuuuucgcugugaccgcccucacaauugccuaccugguuggcuccaauaugacccagagaguggucaucgcccuucuggugcucgcuguggggccugcuuauagcgcccauugcaucggaauuacagaccgggauuuuaucgaaggcguccacgggggaaccuggguuucugcgacgcuggagcaagacaaaugugugacagugauggcccccgauaagccuucccuggacauuagccucgagaccgucgcuaucgauagaccggccgaagugcgcaaaguuugcuacaacgcugugcugacacaugucaagauuaaugacaaaugucccucuaccggcgaggcccaccuugcggaagagaacgaaggcgacaaugccugcaagcggaccuauuccgauagaggguggggaaacggcugugggcuguucggaaagggcagcaucguggcuugcgccaaauuuacaugcgcuaagucuaugucccucuucgagguugaccagacgaaaauucaguacgugauccgcgcccagcugcacgucggggccaagcaagagaauuggaacaccgauaucaaaacacuuaaguuugacgcucugagcggaucccaggaaguggaguucauuggcuacggcaaagcgacccucgaaugucagguccagacagccguggauuuugggaacucuuauaucgcugagauggaaaccgagagcuggauuguugaccggcaaugggcccaggaucugacgcugccuuggcaguccggaagcggcgggguguggagagagaugcaucaccucgucgaguucgagcccccucaugccgcuacaauccgcgugcuggcccuuggaaaucaagaaggcucucugaagaccgcgcucaccggggcuaugcggguuacaaaggacaccaacgauaauaaccuguacaaacuucacggcggacacguguccugcagagucaagcugagcgcccucacacugaaaggcacgucuuauaagauuuguaccgacaaaauguuuuucgugaagaaucccacagauaccgggcauggaacagugguuaugcaggucaaggugagcaaaggcgccccgugccgcaucccugugaucgucgcugacgaccugaccgccgcuauuaacaaggggauccucgugacgguuaaucccauugccuccaccaacgaugacgaggugcugaucgaagucaauccucccuucggagauucuuacauuaucgugggccggggagacagcagacuuacauaucaguggcacaaagagggcuccagcaucggaaagcuguuuacccagacaaugaaaggcguugagcgccucgcggugaugggggauaccgccugggacuucucuuccgcuggaggcuuuuucacgagcgucgggaaggggauucauacaguguuuggcucugccuuccaagggcuguuuggcggacugaacuggaucaccaagguuauuaugggcgcugugcuuaucugggucgggauuaauacacggaacaugaccauguccaugagcaugauccucgugggagugauuaugauguuccugucccugggcgucggggccugaggacuaguaauaaggaaacuguaugaaugucugugggcaggaagugaagagauccuucuguaaagguuuuuggaauuaugucugcugaauaauaaacuuuuuugaaauaauaaaucugguagaaaaaugagaucuaaaaaaaaaaaaaaaaaaaaaaaaaaaaaaaaaaaaaaaaaaaaaaaaaaaaaaaaaaaaaaaaugcaucccccccccccccccccccccccccccccccaaaggcucuuuucagagccaccagaauu

SEQ ID NO: 1920 - RNA, 2504 nt, Artificial Sequence
  mRNA product Design h-4 comprising derived and/or modified sequence from YFV__NC_002031.1__SSjev(V3)-prME-XX (polyprotein: aa122-788) (opt5)
gggagagggcgcuuggcuugcaaggacccugagcugcggcauugaagcacacccaacccaacucgacugaagucagccucacugaaccggaucugagaaucuucucucucugggcuugccagggcucuccgaaccuagcuagcauccucuucaauuccaacuagaaagcuuaccaugaacgagggcagcaucauguggcuggccucccucgcuguggucauugccugcgcgggggcuguuacgcuggugcggaaaaaccgcuggcuucugcucaaugugaccagcgaggaucuggggaagacauuuuccgucggaaccggcaacugcacaaccaauauucuggaagccaaauacuggugucccgacucuauggaguauaacugcccuaaucucagcccgagagaagaacccgaugacaucgauuguuggugcuacgggguggaaaacguucggguggcuuauggaaagugugacuccgccggccgcucuagacggagccgcagagcgauugaucugccuacacaugagaaucacggccuuaaaacccggcaagagaaguggaugacggggcgcaugggagaaagacagcugcagaagaucgagcggugguucguccgcaaccccuuuuucgcugugaccgcccucacaauugccuaccugguuggcuccaauaugacccagagaguggucaucgcccuucuggugcucgcuguggggccugcuuauagcgcccauugcaucggaauuacagaccgggauuuuaucgaaggcguccacgggggaaccuggguuucugcgacgcuggagcaagacaaaugugugacagugauggcccccgauaagccuucccuggacauuagccucgagaccgucgcuaucgauagaccggccgaagugcgcaaaguuugcuacaacgcugugcugacacaugucaagauuaaugacaaaugucccucuaccggcgaggcccaccuugcggaagagaacgaaggcgacaaugccugcaagcggaccuauuccgauagaggguggggaaacggcugugggcuguucggaaagggcagcaucguggcuugcgccaaauuuacaugcgcuaagucuaugucccucuucgagguugaccagacgaaaauucaguacgugauccgcgcccagcugcacgucggggccaagcaagagaauuggaacaccgauaucaaaacacuuaaguuugacgcucugagcggaucccaggaaguggaguucauuggcuacggcaaagcgacccucgaaugucagguccagacagccguggauuuugggaacucuuauaucgcugagauggaaaccgagagcuggauuguugaccggcaaugggcccaggaucugacgcugccuuggcaguccggaagcggcgggguguggagagagaugcaucaccucgucgaguucgagcccccucaugccgcuacaauccgcgugcuggcccuuggaaaucaagaaggcucucugaagaccgcgcucaccggggcuaugcggguuacaaaggacaccaacgauaauaaccuguacaaacuucacggcggacacguguccugcagagucaagcugagcgcccucacacugaaaggcacgucuuauaagauuuguaccgacaaaauguuuuucgugaagaaucccacagauaccgggcauggaacagugguuaugcaggucaaggugagcaaaggcgccccgugccgcaucccugugaucgucgcugacgaccugaccgccgcuauuaacaaggggauccucgugacgguuaaucccauugccuccaccaacgaugacgaggugcugaucgaagucaauccucccuucggagauucuuacauuaucgugggccggggagacagcagacuuacauaucaguggcacaaagagggcuccagcaucggaaagcuguuuacccagacaaugaaaggcguugagcgccucgcggugaugggggauaccgccugggacuucucuuccgcuggaggcuuuuucacgagcgucgggaaggggauucauacaguguuuggcucugccuuccaagggcuguuuggcggacugaacuggaucaccaagguuauuaugggcgcugugcuuaucugggucgggauuaauacacggaacaugaccauguccaugagcaugauccucgugggagugauuaugauguuccugucccugggcgucggggccgaucagggaugugcgaucaauuuuggcaaaugaggacuaguaauaaggaaacuguaugaaugucugugggcaggaagugaagagauccuucuguaaagguuuuuggaauuaugucugcugaauaauaaacuuuuuugaaauaauaaaucugguagaaaaaugagaucuaaaaaaaaaaaaaaaaaaaaaaaaaaaaaaaaaaaaaaaaaaaaaaaaaaaaaaaaaaaaaaaaugcaucccccccccccccccccccccccccccccccaaaggcucuuuucagagccaccagaauu

SEQ ID NO: 1921 - RNA, 2513 nt, Artificial Sequence
  mRNA product Design h-4 comprising derived and/or modified sequence from YFV__NC_002031.1__X-SS-prMEdelstem_TM-JEV (polyprotein: aa92-681) (opt6)
gggagagggcgcuuggcuugcaaggacccugagcugcggcauugaagcacacccaacccaacucgacugaagucagccucacugaaccggaucugagaaucuucucucucugggcuugccagggcucuccgaaccuagcuagcauccucuucaauuccaacuagaaagcuuaccaugagaggauuaucaaguagaaaaagaagaucacaugauguacuaaccgugcaauuuuugaucuuagggaugcucuuaaugacaggagguguuacauuaguaagaaagaaucgauggcugcuuuuaaaugugacaucagaggauuuagggaaaacauuuucgguaggaacaggaaauuguacuacaaauauacuugaagcaaaauauuggugcccagacucuauggaauauaauuguccaaauuuaaguccuagagaagaaccugacgauauagauuguugguguuaugguguagaaaauguaagaguagcauacggcaaaugcgauagugcaggacguucuagacguucaaggagagccauagaucugcccacucacgaaaaucacggauugaaaacacgacaagaaaaauggaugacugggcgaaugggagaaagacaacuacagaaaauugaaagaugguucguuagaaauccauucuuugccguaacagcuuuaacaauagccuauuuaguagguaguaauaugacacaaagaguaguaauagcauugcuaguguuagcaguuggaccagcuuauagugcacauugcauaggaauaacagauagagacuuuauagaaggaguacacgggggaacuuggguaagugccacuuuagaacaagauaaauguguuacagugauggcgccagauaaaccaagucuggacauaaguuuggaaacaguagcgauugauagacccgcagaaguaagaaaaguuuguuauaaugcuguucuaacccauguuaaaauaaaugauaaaugcccuagcaccggagaagcccaucuagcagaagaaaaugaaggagauaacgcauguaaacgaacauacucagauagaggauggggcaacggauguggcuuguuuggaaaagguagcauaguagcaugcgcuaaauuuacaugcgcaaagucaaugucauuauuugaaguagaucaaacaaaaauacaauauguaauaagagcucaauuacacgugggugcaaaacaagaaaauuggaauacagacauaaagacacuaaaguucgacgcauuaaguggaucacaagagguagaauuuauaggguacggaaaagcgacuuuagagugucaaguccaaacagcaguagauuucgguaacucauacauagcagaaauggaaacugaaaguuggauaguagauagacaaugggcacaagacuugacacuaccuuggcaaucaggaagcggaggaguauggagagaaaugcaucauuuaguagaauuugaaccaccucaugcagcaacaauaagaguauuagcccuaggaaaccaagaaggaaguuuaaaaacagcacuaacaggagcuaugagaguaacaaaagauacaaaugacaacaaucuauacaaauuacacggaggacauguaagcugccggguaaaguugagcgcacuaacauuaaaaggaacgaguuauaaaauaugcacagauaaaauguucuuuguuaaaaauccuacagauaccggucauggaacaguaguaaugcaaguaaaaguaaguaaaggcgcucccuguagaauaccuguaauagucgcagacgauuuaaccgcagcaauaaauaaaggaauauuagucacgguaaacccaauagcgucaacaaaugaugaugaaguauuaauagaaguuaacccaccuuuuggagacaguuauauaauagucggaaggggugauaguagacuaacauaccaauggcauaaagaaggaagcucaauaggaaguacacuaggaaaagcauuuaguacaacauuaaaaggagcacaaagauuagcagcauuaggagauacagcaugggauuuuggaagcauaggaggaguauuuaauaguauagguagagcaguacaucaaguauuuggaggagcauuuagaacauuauuuggaggaaugaguuggauaacacaaggauuaaugggagcauuauuauuauggaugggaguaaaugcaagagauagaaguauagcauuagcauuuuuagcaacaggaggaguauuaguauuuuuagcaacaaauguacaugcaugaggacuaguaauaaggaaacuguaugaaugucugugggcaggaagugaagagauccuucuguaaagguuuuuggaauuaugucugcugaauaauaaacuuuuuugaaauaauaaaucugguagaaaaaugagaucuaaaaaaaaaaaaaaaaaaaaaaaaaaaaaaaaaaaaaaaaaaaaaaaaaaaaaaaaaaaaaaaaugcaucccccccccccccccccccccccccccccccaaaggcucuuuucagagccaccagaauu

SEQ ID NO: 1922 - RNA, 2486 nt, Artificial Sequence
  mRNA product Design h-4 comprising derived and/or modified sequence from YFV__NC_002031.1__SSjev(V3)-prMEdelstem_TM-JEV (polyprotein: aa122-681) (opt6)
gggagagggcgcuuggcuugcaaggacccugagcugcggcauugaagcacacccaacccaacucgacugaagucagccucacugaaccggaucugagaaucuucucucucugggcuugccagggcucuccgaaccuagcuagcauccucuucaauuccaacuagaaagcuuaccaugaaugaagguucaauuaugugguuggcaucauuagcaguuguaauugcaugugcuggugcaguuacauuaguaagaaagaaucgauggcugcuuuuaaaugugacaucagaggauuuagggaaaacauuuucgguaggaacaggaaauuguacuacaaauauacuugaagcaaaauauuggugcccagacucuauggaauauaauuguccaaauuuaaguccuagagaagaaccugacgauauagauuguugguguuaugguguagaaaauguaagaguagcauacggcaaaugcgauagugcaggacguucuagacguucaaggagagccauagaucugcccacucacgaaaaucacggauugaaaacacgacaagaaaaauggaugacugggcgaaugggagaaagacaacuacagaaaauugaaagaugguucguuagaaauccauucuuugccguaacagcuuuaacaauagccuauuuaguagguaguaauaugacacaaagaguaguaauagcauugcuaguguuagcaguuggaccagcuuauagugcacauugcauaggaauaacagauagagacuuuauagaaggaguacacgggggaacuuggguaagugccacuuuagaacaagauaaauguguuacagugauggcgccagauaaaccaagucuggacauaaguuuggaaacaguagcgauugauagacccgcagaaguaagaaaaguuuguuauaaugcuguucuaacccauguuaaaauaaaugauaaaugcccuagcaccggagaagcccaucuagcagaagaaaaugaaggagauaacgcauguaaacgaacauacucagauagaggauggggcaacggauguggcuuguuuggaaaagguagcauaguagcaugcgcuaaauuuacaugcgcaaagucaaugucauuauuugaaguagaucaaacaaaaauacaauauguaauaagagcucaauuacacgugggugcaaaacaagaaaauuggaauacagacauaaagacacuaaaguucgacgcauuaaguggaucacaagagguagaauuuauaggguacggaaaagcgacuuuagagugucaaguccaaacagcaguagauuucgguaacucauacauagcagaaauggaaacugaaaguuggauaguagauagacaaugggcacaagacuugacacuaccuuggcaaucaggaagcggaggaguauggagagaaaugcaucauuuaguagaauuugaaccaccucaugcagcaacaauaagaguauuagcccuaggaaaccaagaaggaaguuuaaaaacagcacuaacaggagcuaugagaguaacaaaagauacaaaugacaacaaucuauacaaauuacacggaggacauguaagcugccggguaaaguugagcgcacuaacauuaaaaggaacgaguuauaaaauaugcacagauaaaauguucuuuguuaaaaauccuacagauaccggucauggaacaguaguaaugcaaguaaaaguaaguaaaggcgcucccuguagaauaccuguaauagucgcagacgauuuaaccgcagcaauaaauaaaggaauauuagucacgguaaacccaauagcgucaacaaaugaugaugaaguauuaauagaaguuaacccaccuuuuggagacaguuauauaauagucggaaggggugauaguagacuaacauaccaauggcauaaagaaggaagcucaauaggaaguacacuaggaaaagcauuuaguacaacauuaaaaggagcacaaagauuagcagcauuaggagauacagcaugggauuuuggaagcauaggaggaguauuuaauaguauagguagagcaguacaucaaguauuuggaggagcauuuagaacauuauuuggaggaaugaguuggauaacacaaggauuaaugggagcauuauuauuauggaugggaguaaaugcaagagauagaaguauagcauuagcauuuuuagcaacaggaggaguauuaguauuuuuagcaacaaauguacaugcaugaggacuaguaauaaggaaacuguaugaaugucugugggcaggaagugaagagauccuucuguaaagguuuuuggaauuaugucugcugaauaauaaacuuuuuugaaauaauaaaucugguagaaaaaugagaucuaaaaaaaaaaaaaaaaaaaaaaaaaaaaaaaaaaaaaaaaaaaaaaaaaaaaaaaaaaaaaaaaugcaucccccccccccccccccccccccccccccccaaaggcucuuuucagagccaccagaauu

SEQ ID NO: 1923 - RNA, 2501 nt, Artificial Sequence
  mRNA product Design h-4 comprising derived and/or modified sequence from YFV__NC_002031.1__X-SS-prME (polyprotein: aa92-778) (opt6)
gggagagggcgcuuggcuugcaaggacccugagcugcggcauugaagcacacccaacccaacucgacugaagucagccucacugaaccggaucugagaaucuucucucucugggcuugccagggcucuccgaaccuagcuagcauccucuucaauuccaacuagaaagcuuaccaugagaggauuaucaaguagaaaaagaagaucacaugauguacuaaccgugcaauuuuugaucuuagggaugcucuuaaugacaggagguguuacauuaguaagaaagaaucgauggcugcuuuuaaaugugacaucagaggauuuagggaaaacauuuucgguaggaacaggaaauuguacuacaaauauacuugaagcaaaauauuggugcccagacucuauggaauauaauuguccaaauuuaaguccuagagaagaaccugacgauauagauuguugguguuaugguguagaaaauguaagaguagcauacggcaaaugcgauagugcaggacguucuagacguucaaggagagccauagaucugcccacucacgaaaaucacggauugaaaacacgacaagaaaaauggaugacugggcgaaugggagaaagacaacuacagaaaauugaaagaugguucguuagaaauccauucuuugccguaacagcuuuaacaauagccuauuuaguagguaguaauaugacacaaagaguaguaauagcauugcuaguguuagcaguuggaccagcuuauagugcacauugcauaggaauaacagauagagacuuuauagaaggaguacacgggggaacuuggguaagugccacuuuagaacaagauaaauguguuacagugauggcgccagauaaaccaagucuggacauaaguuuggaaacaguagcgauugauagacccgcagaaguaagaaaaguuuguuauaaugcuguucuaacccauguuaaaauaaaugauaaaugcccuagcaccggagaagcccaucuagcagaagaaaaugaaggagauaacgcauguaaacgaacauacucagauagaggauggggcaacggauguggcuuguuuggaaaagguagcauaguagcaugcgcuaaauuuacaugcgcaaagucaaugucauuauuugaaguagaucaaacaaaaauacaauauguaauaagagcucaauuacacgugggugcaaaacaagaaaauuggaauacagacauaaagacacuaaaguucgacgcauuaaguggaucacaagagguagaauuuauaggguacggaaaagcgacuuuagagugucaaguccaaacagcaguagauuucgguaacucauacauagcagaaauggaaacugaaaguuggauaguagauagacaaugggcacaagacuugacacuaccuuggcaaucaggaagcggaggaguauggagagaaaugcaucauuuaguagaauuugaaccaccucaugcagcaacaauaagaguauuagcccuaggaaaccaagaaggaaguuuaaaaacagcacuaacaggagcuaugagaguaacaaaagauacaaaugacaacaaucuauacaaauuacacggaggacauguaagcugccggguaaaguugagcgcacuaacauuaaaaggaacgaguuauaaaauaugcacagauaaaauguucuuuguuaaaaauccuacagauaccggucauggaacaguaguaaugcaaguaaaaguaaguaaaggcgcucccuguagaauaccuguaauagucgcagacgauuuaaccgcagcaauaaauaaaggaauauuagucacgguaaacccaauagcgucaacaaaugaugaugaaguauuaauagaaguuaacccaccuuuuggagacaguuauauaauagucggaaggggugauaguagacuaacauaccaauggcauaaagaaggaagcucaauaggaaaauuauuuacucaaaccaugaaagguguagaaaggcuagcuguuaugggugacacagcaugggauuuuucaagcgcaggaggguucuuuacaucaguagguaaaggaauacauacaguauuuggaagugcauuucaaggauuauuuggugguuuaaauuggauaacaaaaguaauaaugggcgcaguuuuaauauggguagguauaaacacaagaaauaugacaaugucuaugaguaugauauuggucggaguaauaaugauguuuuuaucacuaggagugggugcaugaggacuaguaauaaggaaacuguaugaaugucugugggcaggaagugaagagauccuucuguaaagguuuuuggaauuaugucugcugaauaauaaacuuuuuugaaauaauaaaucugguagaaaaaugagaucuaaaaaaaaaaaaaaaaaaaaaaaaaaaaaaaaaaaaaaaaaaaaaaaaaaaaaaaaaaaaaaaaugcaucccccccccccccccccccccccccccccccaaaggcucuuuucagagccaccagaauu

SEQ ID NO: 1924 - RNA, 2504 nt, Artificial Sequence
  mRNA product Design h-4 comprising derived and/or modified sequence from YFV__NC_002031.1__SSjev(V3)-prME-XX (polyprotein: aa122-788) (opt6)
gggagagggcgcuuggcuugcaaggacccugagcugcggcauugaagcacacccaacccaacucgacugaagucagccucacugaaccggaucugagaaucuucucucucugggcuugccagggcucuccgaaccuagcuagcauccucuucaauuccaacuagaaagcuuaccaugaaugaagguucaauuaugugguuggcaucauuagcaguuguaauugcaugugcuggugcaguuacauuaguaagaaagaaucgauggcugcuuuuaaaugugacaucagaggauuuagggaaaacauuuucgguaggaacaggaaauuguacuacaaauauacuugaagcaaaauauuggugcccagacucuauggaauauaauuguccaaauuuaaguccuagagaagaaccugacgauauagauuguugguguuaugguguagaaaauguaagaguagcauacggcaaaugcgauagugcaggacguucuagacguucaaggagagccauagaucugcccacucacgaaaaucacggauugaaaacacgacaagaaaaauggaugacugggcgaaugggagaaagacaacuacagaaaauugaaagaugguucguuagaaauccauucuuugccguaacagcuuuaacaauagccuauuuaguagguaguaauaugacacaaagaguaguaauagcauugcuaguguuagcaguuggaccagcuuauagugcacauugcauaggaauaacagauagagacuuuauagaaggaguacacgggggaacuuggguaagugccacuuuagaacaagauaaauguguuacagugauggcgccagauaaaccaagucuggacauaaguuuggaaacaguagcgauugauagacccgcagaaguaagaaaaguuuguuauaaugcuguucuaacccauguuaaaauaaaugauaaaugcccuagcaccggagaagcccaucuagcagaagaaaaugaaggagauaacgcauguaaacgaacauacucagauagaggauggggcaacggauguggcuuguuuggaaaagguagcauaguagcaugcgcuaaauuuacaugcgcaaagucaaugucauuauuugaaguagaucaaacaaaaauacaauauguaauaagagcucaauuacacgugggugcaaaacaagaaaauuggaauacagacauaaagacacuaaaguucgacgcauuaaguggaucacaagagguagaauuuauaggguacggaaaagcgacuuuagagugucaaguccaaacagcaguagauuucgguaacucauacauagcagaaauggaaacugaaaguuggauaguagauagacaaugggcacaagacuugacacuaccuuggcaaucaggaagcggaggaguauggagagaaaugcaucauuuaguagaauuugaaccaccucaugcagcaacaauaagaguauuagcccuaggaaaccaagaaggaaguuuaaaaacagcacuaacaggagcuaugagaguaacaaaagauacaaaugacaacaaucuauacaaauuacacggaggacauguaagcugccggguaaaguugagcgcacuaacauuaaaaggaacgaguuauaaaauaugcacagauaaaauguucuuuguuaaaaauccuacagauaccggucauggaacaguaguaaugcaaguaaaaguaaguaaaggcgcucccuguagaauaccuguaauagucgcagacgauuuaaccgcagcaauaaauaaaggaauauuagucacgguaaacccaauagcgucaacaaaugaugaugaaguauuaauagaaguuaacccaccuuuuggagacaguuauauaauagucggaaggggugauaguagacuaacauaccaauggcauaaagaaggaagcucaauaggaaaauuauuuacucaaaccaugaaagguguagaaaggcuagcuguuaugggugacacagcaugggauuuuucaagcgcaggaggguucuuuacaucaguagguaaaggaauacauacaguauuuggaagugcauuucaaggauuauuuggugguuuaaauuggauaacaaaaguaauaaugggcgcaguuuuaauauggguagguauaaacacaagaaauaugacaaugucuaugaguaugauauuggucggaguaauaaugauguuuuuaucacuaggagugggugcagaucaagguugcgcuauuaauuuuggaaaaugaggacuaguaauaaggaaacuguaugaaugucugugggcaggaagugaagagauccuucuguaaagguuuuuggaauuaugucugcugaauaauaaacuuuuuugaaauaauaaaucugguagaaaaaugagaucuaaaaaaaaaaaaaaaaaaaaaaaaaaaaaaaaaaaaaaaaaaaaaaaaaaaaaaaaaaaaaaaaugcaucccccccccccccccccccccccccccccccaaaggcucuuuucagagccaccagaauu

SEQ ID NO: 1925 - RNA, 2513 nt, Artificial Sequence
  mRNA product Design h-4 comprising derived and/or modified sequence from YFV__NC_002031.1__X-SS-prMEdelstem_TM-JEV (polyprotein: aa92-681) (opt11)
gggagagggcgcuuggcuugcaaggacccugagcugcggcauugaagcacacccaacccaacucgacugaagucagccucacugaaccggaucugagaaucuucucucucugggcuugccagggcucuccgaaccuagcuagcauccucuucaauuccaacuagaaagcuuaccaugcggggacuaagcagcagaaaaagacgcagccacgaugugcucaccgugcaauuccucauacuggggaugcuccuaaugaccggaggcgugacccuaguaaggaaaaacagauggcuacuacuaaacguaaccucagaagaucuaggaaagacauuuucagucggcacaggcaacugcacaaccaacauacuagaagcaaaauauuggugcccagacagcauggaauacaacugucccaaccucagcccaagagaggaaccagacgacauagacugcugguguuacggaguagaaaacguaagaguggcauacggcaaaugcgacagcgcaggcaggagccgaagaucccgcagagccaucgacuugcccacgcacgaaaaccacggccucaaaacacgacaagaaaaauggaugacagggcgaaugggagaacgacagcuccagaaaauagaacgaugguucguccggaacccguucuucgcaguaacggcacuaacaaucgcauaccucguaggcagcaacaugacacaaagaguggucaucgcgcuacucguacuagcaguggggcccgcauacagugcacacugcauaggaaucacagaccgugacuucaucgaaggcguacacggaggaacguggguaagcgcgacacuggaacaagacaaaugcgugacaguaauggcaccagacaaaccaagccuagacauaucccuagaaacggucgccaucgaccgucccgcagaaguacgaaagguaugcuauaaugcaguccucacacacgucaaaauaaacgacaaaugccccagcacgggcgaagcacaccucgccgaagaaaacgaaggggauaacgcgugcaaacgcaccuacuccgacaggggauggggcaacggaugcggacuguucggaaaaggauccauagucgcaugcgcaaaauuuaccugcgcaaaaagcaugagcuuguucgagguagaccaaacgaagauccaauacguaauccgagcucaacuacacguuggggccaagcaagagaacuggaauacggacaucaaaacacuaaaauucgacgcacucuccggcucacaagaagucgaguucaucggcuacggcaaagcaacacuagaaugccaaguacaaacagcgguggacuucggcaacagcuacauagcagaaauggaaacagaaagcuggauaguagaccgacaaugggcacaagaccuaacucugccauggcaaagcggcucaggaggaguguggagagagaugcaccaccugguagaguucgaacccccacacgcagcaacaauaaggguacuggcacuaggcaaccaagaaggcagccuaaaaaccgcacucacaggagccaugcgcgugacgaaggacaccaacgacaacaaccucuacaaacuccacggagggcacguauccugccgcguaaaacuaucagcacuaacgcuaaaaggaacaagcuacaaaauaugcacagacaaaauguucuucgucaaaaaccccacagacacaggccacggcacagucguaaugcaagugaaggucagcaagggggcccccugccgaaucccagucauaguggcagacgaccucacggccgccaucaacaaagggauccugguaacagugaacccaauagcaucgaccaacgacgacgaaguccucauagaagugaaucccccguucggcgacagcuacaucaucguaggacgcggcgacucccgacugacguaccaauggcauaaagaaggcagcagcauugggagcacgcucgggaaagcguucucgaccacgcucaagggcgcgcaaaggcucgcggccuugggcgauaccgcgugggauuucgggagcauaggcggggucuuuaacucgaucgggcgcgcgguccaucaaguguucgggggcgcguucaggaccuuguucgggggcaugagcuggaucacgcaagggcucaugggcgcgcucuugcucuggaugggggucaaugccagggacaggagcauagccuuggccuuucucgcgaccgggggcgugcucguguucuuggccacgaacgugcacgcgugaggacuaguaauaaggaaacuguaugaaugucugugggcaggaagugaagagauccuucuguaaagguuuuuggaauuaugucugcugaauaauaaacuuuuuugaaauaauaaaucugguagaaaaaugagaucuaaaaaaaaaaaaaaaaaaaaaaaaaaaaaaaaaaaaaaaaaaaaaaaaaaaaaaaaaaaaaaaaugcaucccccccccccccccccccccccccccccccaaaggcucuuuucagagccaccagaauu

SEQ ID NO: 1926 - RNA, 2486 nt, Artificial Sequence
  mRNA product Design h-4 comprising derived and/or modified sequence from YFV__NC_002031.1__SSjev(V3)-prMEdelstem_TM-JEV (polyprotein: aa122-681) (opt11)
gggagagggcgcuuggcuugcaaggacccugagcugcggcauugaagcacacccaacccaacucgacugaagucagccucacugaaccggaucugagaaucuucucucucugggcuugccagggcucuccgaaccuagcuagcauccucuucaauuccaacuagaaagcuuaccaugaacgagggcucgaucaugugguuggccucgcucgcggucgugaucgcgugcgcgggcgcggugacccuaguaaggaaaaacagauggcuacuacuaaacguaaccucagaagaucuaggaaagacauuuucagucggcacaggcaacugcacaaccaacauacuagaagcaaaauauuggugcccagacagcauggaauacaacugucccaaccucagcccaagagaggaaccagacgacauagacugcugguguuacggaguagaaaacguaagaguggcauacggcaaaugcgacagcgcaggcaggagccgaagaucccgcagagccaucgacuugcccacgcacgaaaaccacggccucaaaacacgacaagaaaaauggaugacagggcgaaugggagaacgacagcuccagaaaauagaacgaugguucguccggaacccguucuucgcaguaacggcacuaacaaucgcauaccucguaggcagcaacaugacacaaagaguggucaucgcgcuacucguacuagcaguggggcccgcauacagugcacacugcauaggaaucacagaccgugacuucaucgaaggcguacacggaggaacguggguaagcgcgacacuggaacaagacaaaugcgugacaguaauggcaccagacaaaccaagccuagacauaucccuagaaacggucgccaucgaccgucccgcagaaguacgaaagguaugcuauaaugcaguccucacacacgucaaaauaaacgacaaaugccccagcacgggcgaagcacaccucgccgaagaaaacgaaggggauaacgcgugcaaacgcaccuacuccgacaggggauggggcaacggaugcggacuguucggaaaaggauccauagucgcaugcgcaaaauuuaccugcgcaaaaagcaugagcuuguucgagguagaccaaacgaagauccaauacguaauccgagcucaacuacacguuggggccaagcaagagaacuggaauacggacaucaaaacacuaaaauucgacgcacucuccggcucacaagaagucgaguucaucggcuacggcaaagcaacacuagaaugccaaguacaaacagcgguggacuucggcaacagcuacauagcagaaauggaaacagaaagcuggauaguagaccgacaaugggcacaagaccuaacucugccauggcaaagcggcucaggaggaguguggagagagaugcaccaccugguagaguucgaacccccacacgcagcaacaauaaggguacuggcacuaggcaaccaagaaggcagccuaaaaaccgcacucacaggagccaugcgcgugacgaaggacaccaacgacaacaaccucuacaaacuccacggagggcacguauccugccgcguaaaacuaucagcacuaacgcuaaaaggaacaagcuacaaaauaugcacagacaaaauguucuucgucaaaaaccccacagacacaggccacggcacagucguaaugcaagugaaggucagcaagggggcccccugccgaaucccagucauaguggcagacgaccucacggccgccaucaacaaagggauccugguaacagugaacccaauagcaucgaccaacgacgacgaaguccucauagaagugaaucccccguucggcgacagcuacaucaucguaggacgcggcgacucccgacugacguaccaauggcauaaagaaggcagcagcauugggagcacgcucgggaaagcguucucgaccacgcucaagggcgcgcaaaggcucgcggccuugggcgauaccgcgugggauuucgggagcauaggcggggucuuuaacucgaucgggcgcgcgguccaucaaguguucgggggcgcguucaggaccuuguucgggggcaugagcuggaucacgcaagggcucaugggcgcgcucuugcucuggaugggggucaaugccagggacaggagcauagccuuggccuuucucgcgaccgggggcgugcucguguucuuggccacgaacgugcacgcgugaggacuaguaauaaggaaacuguaugaaugucugugggcaggaagugaagagauccuucuguaaagguuuuuggaauuaugucugcugaauaauaaacuuuuuugaaauaauaaaucugguagaaaaaugagaucuaaaaaaaaaaaaaaaaaaaaaaaaaaaaaaaaaaaaaaaaaaaaaaaaaaaaaaaaaaaaaaaaugcaucccccccccccccccccccccccccccccccaaaggcucuuuucagagccaccagaauu

SEQ ID NO: 1927 - RNA, 2501 nt, Artificial Sequence
  mRNA product Design h-4 comprising derived and/or modified sequence from YFV__NC_002031.1__X-SS-prME (polyprotein: aa92-778) (opt11)
gggagagggcgcuuggcuugcaaggacccugagcugcggcauugaagcacacccaacccaacucgacugaagucagccucacugaaccggaucugagaaucuucucucucugggcuugccagggcucuccgaaccuagcuagcauccucuucaauuccaacuagaaagcuuaccaugcggggacuaagcagcagaaaaagacgcagccacgaugugcucaccgugcaauuccucauacuggggaugcuccuaaugaccggaggcgugacccuaguaaggaaaaacagauggcuacuacuaaacguaaccucagaagaucuaggaaagacauuuucagucggcacaggcaacugcacaaccaacauacuagaagcaaaauauuggugcccagacagcauggaauacaacugucccaaccucagcccaagagaggaaccagacgacauagacugcugguguuacggaguagaaaacguaagaguggcauacggcaaaugcgacagcgcaggcaggagccgaagaucccgcagagccaucgacuugcccacgcacgaaaaccacggccucaaaacacgacaagaaaaauggaugacagggcgaaugggagaacgacagcuccagaaaauagaacgaugguucguccggaacccguucuucgcaguaacggcacuaacaaucgcauaccucguaggcagcaacaugacacaaagaguggucaucgcgcuacucguacuagcaguggggcccgcauacagugcacacugcauaggaaucacagaccgugacuucaucgaaggcguacacggaggaacguggguaagcgcgacacuggaacaagacaaaugcgugacaguaauggcaccagacaaaccaagccuagacauaucccuagaaacggucgccaucgaccgucccgcagaaguacgaaagguaugcuauaaugcaguccucacacacgucaaaauaaacgacaaaugccccagcacgggcgaagcacaccucgccgaagaaaacgaaggggauaacgcgugcaaacgcaccuacuccgacaggggauggggcaacggaugcggacuguucggaaaaggauccauagucgcaugcgcaaaauuuaccugcgcaaaaagcaugagcuuguucgagguagaccaaacgaagauccaauacguaauccgagcucaacuacacguuggggccaagcaagagaacuggaauacggacaucaaaacacuaaaauucgacgcacucuccggcucacaagaagucgaguucaucggcuacggcaaagcaacacuagaaugccaaguacaaacagcgguggacuucggcaacagcuacauagcagaaauggaaacagaaagcuggauaguagaccgacaaugggcacaagaccuaacucugccauggcaaagcggcucaggaggaguguggagagagaugcaccaccugguagaguucgaacccccacacgcagcaacaauaaggguacuggcacuaggcaaccaagaaggcagccuaaaaaccgcacucacaggagccaugcgcgugacgaaggacaccaacgacaacaaccucuacaaacuccacggagggcacguauccugccgcguaaaacuaucagcacuaacgcuaaaaggaacaagcuacaaaauaugcacagacaaaauguucuucgucaaaaaccccacagacacaggccacggcacagucguaaugcaagugaaggucagcaagggggcccccugccgaaucccagucauaguggcagacgaccucacggccgccaucaacaaagggauccugguaacagugaacccaauagcaucgaccaacgacgacgaaguccucauagaagugaaucccccguucggcgacagcuacaucaucguaggacgcggcgacucccgacugacguaccaauggcauaaagaaggcagcagcauuggaaaacuauucacccaaaccaugaagggcgucgaaagacucgcggugaugggagacaccgcaugggacuucucgagcgcaggcggcuucuucacaagcguaggaaaagggauucacacaguauucggauccgcauuccaaggccucuucgggggacuaaacuggauaacgaaaguaauaaugggagcaguucucauauggguaggaaucaacacacgaaacaugacaauguccaugucaaugauacucguaggcguaaucaugauguuucugucacucggagugggagcaugaggacuaguaauaaggaaacuguaugaaugucugugggcaggaagugaagagauccuucuguaaagguuuuuggaauuaugucugcugaauaauaaacuuuuuugaaauaauaaaucugguagaaaaaugagaucuaaaaaaaaaaaaaaaaaaaaaaaaaaaaaaaaaaaaaaaaaaaaaaaaaaaaaaaaaaaaaaaaugcaucccccccccccccccccccccccccccccccaaaggcucuuuucagagccaccagaauu

SEQ ID NO: 1928 - RNA, 2504 nt, Artificial Sequence
  mRNA product Design h-4 comprising derived and/or modified sequence from YFV__NC_002031.1__SSjev(V3)-prME-XX (polyprotein: aa122-788) (opt11)
gggagagggcgcuuggcuugcaaggacccugagcugcggcauugaagcacacccaacccaacucgacugaagucagccucacugaaccggaucugagaaucuucucucucugggcuugccagggcucuccgaaccuagcuagcauccucuucaauuccaacuagaaagcuuaccaugaacgagggcucgaucaugugguuggccucgcucgcggucgugaucgcgugcgcgggcgcggugacccuaguaaggaaaaacagauggcuacuacuaaacguaaccucagaagaucuaggaaagacauuuucagucggcacaggcaacugcacaaccaacauacuagaagcaaaauauuggugcccagacagcauggaauacaacugucccaaccucagcccaagagaggaaccagacgacauagacugcugguguuacggaguagaaaacguaagaguggcauacggcaaaugcgacagcgcaggcaggagccgaagaucccgcagagccaucgacuugcccacgcacgaaaaccacggccucaaaacacgacaagaaaaauggaugacagggcgaaugggagaacgacagcuccagaaaauagaacgaugguucguccggaacccguucuucgcaguaacggcacuaacaaucgcauaccucguaggcagcaacaugacacaaagaguggucaucgcgcuacucguacuagcaguggggcccgcauacagugcacacugcauaggaaucacagaccgugacuucaucgaaggcguacacggaggaacguggguaagcgcgacacuggaacaagacaaaugcgugacaguaauggcaccagacaaaccaagccuagacauaucccuagaaacggucgccaucgaccgucccgcagaaguacgaaagguaugcuauaaugcaguccucacacacgucaaaauaaacgacaaaugccccagcacgggcgaagcacaccucgccgaagaaaacgaaggggauaacgcgugcaaacgcaccuacuccgacaggggauggggcaacggaugcggacuguucggaaaaggauccauagucgcaugcgcaaaauuuaccugcgcaaaaagcaugagcuuguucgagguagaccaaacgaagauccaauacguaauccgagcucaacuacacguuggggccaagcaagagaacuggaauacggacaucaaaacacuaaaauucgacgcacucuccggcucacaagaagucgaguucaucggcuacggcaaagcaacacuagaaugccaaguacaaacagcgguggacuucggcaacagcuacauagcagaaauggaaacagaaagcuggauaguagaccgacaaugggcacaagaccuaacucugccauggcaaagcggcucaggaggaguguggagagagaugcaccaccugguagaguucgaacccccacacgcagcaacaauaaggguacuggcacuaggcaaccaagaaggcagccuaaaaaccgcacucacaggagccaugcgcgugacgaaggacaccaacgacaacaaccucuacaaacuccacggagggcacguauccugccgcguaaaacuaucagcacuaacgcuaaaaggaacaagcuacaaaauaugcacagacaaaauguucuucgucaaaaaccccacagacacaggccacggcacagucguaaugcaagugaaggucagcaagggggcccccugccgaaucccagucauaguggcagacgaccucacggccgccaucaacaaagggauccugguaacagugaacccaauagcaucgaccaacgacgacgaaguccucauagaagugaaucccccguucggcgacagcuacaucaucguaggacgcggcgacucccgacugacguaccaauggcauaaagaaggcagcagcauuggaaaacuauucacccaaaccaugaagggcgucgaaagacucgcggugaugggagacaccgcaugggacuucucgagcgcaggcggcuucuucacaagcguaggaaaagggauucacacaguauucggauccgcauuccaaggccucuucgggggacuaaacuggauaacgaaaguaauaaugggagcaguucucauauggguaggaaucaacacacgaaacaugacaauguccaugucaaugauacucguaggcguaaucaugauguuucugucacucggagugggagcagaccaagguugcgccauaaacuucggcaagugaggacuaguaauaaggaaacuguaugaaugucugugggcaggaagugaagagauccuucuguaaagguuuuuggaauuaugucugcugaauaauaaacuuuuuugaaauaauaaaucugguagaaaaaugagaucuaaaaaaaaaaaaaaaaaaaaaaaaaaaaaaaaaaaaaaaaaaaaaaaaaaaaaaaaaaaaaaaaugcaucccccccccccccccccccccccccccccccaaaggcucuuuucagagccaccagaauu

SEQ ID NO: 1929 - RNA, 2529 nt, Artificial Sequence
  mRNA product Design h-5 comprising derived and/or modified sequence from YFV__NC_002031.1__X-SS-prMEdelstem_TM-JEV (polyprotein: aa92-681) (wt)
gggagagggcgcuuggcuugcaaggacccugagcugcggcauugaagcacacccaacccaacucgacugaagucagccucacugaaccggaucugagaaucuucucucucugggcuugccagggcucuccgaaccuagcuagcauccucuucaauuccaacuagaaagcuuaccaugagaggauuguccucaaggaaacgccguucccaugauguucugacugugcaauuccuaauuuugggaaugcuguugaugacggguggagugaccuuggugcggaaaaacagaugguugcuccuaaaugugacaucugaggaccucgggaaaacauucucugugggcacaggcaacugcacaacaaacauuuuggaagccaaguacuggugcccagacucaauggaauacaacugucccaaucucaguccaagagaggagccagaugacauugauugcuggugcuaugggguggaaaacguuagagucgcauaugguaagugugacucagcaggcaggucuaggaggucaagaagggccauugacuugccuacgcaugaaaaccaugguuugaagacccggcaagaaaaauggaugacuggaagaaugggugaaaggcaacuccaaaagauugagagaugguucgugaggaaccccuuuuuugcagugacggcucugaccauugccuaccuugugggaagcaacaugacgcaacgagucgugauugcccuacuggucuuggcuguugguccggccuacucagcucacugcauuggaauuacugacagggauuucauugagggggugcauggaggaacuuggguuucagcuacccuggagcaagacaagugugucacuguuauggccccugacaagccuucauuggacaucucacuagagacaguagccauugauagaccugcugaggugaggaaaguguguuacaaugcaguucucacucaugugaagauuaaugacaagugccccagcacuggagaggcccaccuagcugaagagaacgaaggggacaaugcgugcaagcgcacuuauucugauagaggcuggggcaauggcuguggccuauuugggaaagggagcauuguggcaugcgccaaauucacuugugccaaauccaugaguuuguuugagguugaucagaccaaaauucaguaugucaucagagcacaauugcauguaggggccaagcaggaaaauuggaauaccgacauuaagacucucaaguuugaugcccugucaggcucccaggaagucgaguucauuggguauggaaaagcuacacuggaaugccaggugcaaacugcgguggacuuugguaacaguuacaucgcugagauggaaacagagagcuggauaguggacagacagugggcccaggacuugacccugccauggcagaguggaaguggcgggguguggagagagaugcaucaucuugucgaauuugaaccuccgcaugccgccacuaucagaguacuggcccugggaaaccaggaaggcuccuugaaaacagcucuuacuggcgcaaugaggguuacaaaggacacaaaugacaacaaccuuuacaaacuacaugguggacauguuucuugcagagugaaauugucagcuuugacacucaaggggacauccuacaaaauaugcacugacaaaauguuuuuugucaagaacccaacugacacuggccauggcacuguugugaugcaggugaaagugucaaaaggagcccccugcaggauuccagugauaguagcugaugaucuuacagcggcaaucaauaaaggcauuuugguuacaguuaaccccaucgccucaaccaaugaugaugaagugcugauugaggugaacccaccuuuuggagacagcuacauuaucguugggagaggagauucacgucucacuuaccaguggcacaaagagggaagcucaauaggcagcacgcugggcaaggccuuuucaacaacuuugaagggagcucaaagacuggcagcguugggcgacacagccugggacuuuggcucuauuggaggggucuucaacuccauaggaagagccguucaccaaguguuugguggugccuucagaacacucuuugggggaaugucuuggaucacacaagggcuaaugggugcccuacugcucuggaugggcgucaacgcacgagaccgaucaauugcuuuggccuucuuagccacaggaggugugcucguguucuuagcgaccaaugugcacgccuaaggacuaguacuggcugcaucucccuuuccucuguccuccauccuucucccaggauggugaagggggaccugguacccagugauccccaccccaggauccuaaaucaugacuuaccugcuaauaaaaacucauuggaaaagugagaagaucuaaaaaaaaaaaaaaaaaaaaaaaaaaaaaaaaaaaaaaaaaaaaaaaaaaaaaaaaaaaaaaaaugcaucccccccccccccccccccccccccccccccaaaggcucuuuucagagccaccagaauu

SEQ ID NO: 1930 - RNA, 2502 nt, Artificial Sequence
  mRNA product Design h-5 comprising derived and/or modified sequence from YFV__NC_002031.1__SSjev(V3)-prMEdelstem_TM-JEV (polyprotein: aa122-681) (wt)
gggagagggcgcuuggcuugcaaggacccugagcugcggcauugaagcacacccaacccaacucgacugaagucagccucacugaaccggaucugagaaucuucucucucugggcuugccagggcucuccgaaccuagcuagcauccucuucaauuccaacuagaaagcuuaccaugaaugaaggcucaaucauguggcucgcgagcuuggcaguugucauagcuugugcaggagccgugaccuuggugcggaaaaacagaugguugcuccuaaaugugacaucugaggaccucgggaaaacauucucugugggcacaggcaacugcacaacaaacauuuuggaagccaaguacuggugcccagacucaauggaauacaacugucccaaucucaguccaagagaggagccagaugacauugauugcuggugcuaugggguggaaaacguuagagucgcauaugguaagugugacucagcaggcaggucuaggaggucaagaagggccauugacuugccuacgcaugaaaaccaugguuugaagacccggcaagaaaaauggaugacuggaagaaugggugaaaggcaacuccaaaagauugagagaugguucgugaggaaccccuuuuuugcagugacggcucugaccauugccuaccuugugggaagcaacaugacgcaacgagucgugauugcccuacuggucuuggcuguugguccggccuacucagcucacugcauuggaauuacugacagggauuucauugagggggugcauggaggaacuuggguuucagcuacccuggagcaagacaagugugucacuguuauggccccugacaagccuucauuggacaucucacuagagacaguagccauugauagaccugcugaggugaggaaaguguguuacaaugcaguucucacucaugugaagauuaaugacaagugccccagcacuggagaggcccaccuagcugaagagaacgaaggggacaaugcgugcaagcgcacuuauucugauagaggcuggggcaauggcuguggccuauuugggaaagggagcauuguggcaugcgccaaauucacuugugccaaauccaugaguuuguuugagguugaucagaccaaaauucaguaugucaucagagcacaauugcauguaggggccaagcaggaaaauuggaauaccgacauuaagacucucaaguuugaugcccugucaggcucccaggaagucgaguucauuggguauggaaaagcuacacuggaaugccaggugcaaacugcgguggacuuugguaacaguuacaucgcugagauggaaacagagagcuggauaguggacagacagugggcccaggacuugacccugccauggcagaguggaaguggcgggguguggagagagaugcaucaucuugucgaauuugaaccuccgcaugccgccacuaucagaguacuggcccugggaaaccaggaaggcuccuugaaaacagcucuuacuggcgcaaugaggguuacaaaggacacaaaugacaacaaccuuuacaaacuacaugguggacauguuucuugcagagugaaauugucagcuuugacacucaaggggacauccuacaaaauaugcacugacaaaauguuuuuugucaagaacccaacugacacuggccauggcacuguugugaugcaggugaaagugucaaaaggagcccccugcaggauuccagugauaguagcugaugaucuuacagcggcaaucaauaaaggcauuuugguuacaguuaaccccaucgccucaaccaaugaugaugaagugcugauugaggugaacccaccuuuuggagacagcuacauuaucguugggagaggagauucacgucucacuuaccaguggcacaaagagggaagcucaauaggcagcacgcugggcaaggccuuuucaacaacuuugaagggagcucaaagacuggcagcguugggcgacacagccugggacuuuggcucuauuggaggggucuucaacuccauaggaagagccguucaccaaguguuugguggugccuucagaacacucuuugggggaaugucuuggaucacacaagggcuaaugggugcccuacugcucuggaugggcgucaacgcacgagaccgaucaauugcuuuggccuucuuagccacaggaggugugcucguguucuuagcgaccaaugugcacgccuaaggacuaguacuggcugcaucucccuuuccucuguccuccauccuucucccaggauggugaagggggaccugguacccagugauccccaccccaggauccuaaaucaugacuuaccugcuaauaaaaacucauuggaaaagugagaagaucuaaaaaaaaaaaaaaaaaaaaaaaaaaaaaaaaaaaaaaaaaaaaaaaaaaaaaaaaaaaaaaaaugcaucccccccccccccccccccccccccccccccaaaggcucuuuucagagccaccagaauu

SEQ ID NO: 1931 - RNA, 2517 nt, Artificial Sequence
  mRNA product Design h-5 comprising derived and/or modified sequence from YFV__NC_002031.1__X-SS-prME (polyprotein: aa92-778) (wt)
gggagagggcgcuuggcuugcaaggacccugagcugcggcauugaagcacacccaacccaacucgacugaagucagccucacugaaccggaucugagaaucuucucucucugggcuugccagggcucuccgaaccuagcuagcauccucuucaauuccaacuagaaagcuuaccaugagaggauuguccucaaggaaacgccguucccaugauguucugacugugcaauuccuaauuuugggaaugcuguugaugacggguggagugaccuuggugcggaaaaacagaugguugcuccuaaaugugacaucugaggaccucgggaaaacauucucugugggcacaggcaacugcacaacaaacauuuuggaagccaaguacuggugcccagacucaauggaauacaacugucccaaucucaguccaagagaggagccagaugacauugauugcuggugcuaugggguggaaaacguuagagucgcauaugguaagugugacucagcaggcaggucuaggaggucaagaagggccauugacuugccuacgcaugaaaaccaugguuugaagacccggcaagaaaaauggaugacuggaagaaugggugaaaggcaacuccaaaagauugagagaugguucgugaggaaccccuuuuuugcagugacggcucugaccauugccuaccuugugggaagcaacaugacgcaacgagucgugauugcccuacuggucuuggcuguugguccggccuacucagcucacugcauuggaauuacugacagggauuucauugagggggugcauggaggaacuuggguuucagcuacccuggagcaagacaagugugucacuguuauggccccugacaagccuucauuggacaucucacuagagacaguagccauugauagaccugcugaggugaggaaaguguguuacaaugcaguucucacucaugugaagauuaaugacaagugccccagcacuggagaggcccaccuagcugaagagaacgaaggggacaaugcgugcaagcgcacuuauucugauagaggcuggggcaauggcuguggccuauuugggaaagggagcauuguggcaugcgccaaauucacuugugccaaauccaugaguuuguuugagguugaucagaccaaaauucaguaugucaucagagcacaauugcauguaggggccaagcaggaaaauuggaauaccgacauuaagacucucaaguuugaugcccugucaggcucccaggaagucgaguucauuggguauggaaaagcuacacuggaaugccaggugcaaacugcgguggacuuugguaacaguuacaucgcugagauggaaacagagagcuggauaguggacagacagugggcccaggacuugacccugccauggcagaguggaaguggcgggguguggagagagaugcaucaucuugucgaauuugaaccuccgcaugccgccacuaucagaguacuggcccugggaaaccaggaaggcuccuugaaaacagcucuuacuggcgcaaugaggguuacaaaggacacaaaugacaacaaccuuuacaaacuacaugguggacauguuucuugcagagugaaauugucagcuuugacacucaaggggacauccuacaaaauaugcacugacaaaauguuuuuugucaagaacccaacugacacuggccauggcacuguugugaugcaggugaaagugucaaaaggagcccccugcaggauuccagugauaguagcugaugaucuuacagcggcaaucaauaaaggcauuuugguuacaguuaaccccaucgccucaaccaaugaugaugaagugcugauugaggugaacccaccuuuuggagacagcuacauuaucguugggagaggagauucacgucucacuuaccaguggcacaaagagggaagcucaauaggaaaguuguucacucagaccaugaaaggcguggaacgccuggccgucaugggagacaccgccugggauuucagcuccgcuggaggguucuucacuucgguugggaaaggaauccauacgguguuuggcucugccuuucaggggcuauuuggcggcuugaacuggauaacaaaggucaucaugggggcgguacuuauauggguuggcaucaacacaagaaacaugacaauguccaugagcaugaucuugguaggagugaucaugauguuuuugucucuaggaguuggggcguaaggacuaguacuggcugcaucucccuuuccucuguccuccauccuucucccaggauggugaagggggaccugguacccagugauccccaccccaggauccuaaaucaugacuuaccugcuaauaaaaacucauuggaaaagugagaagaucuaaaaaaaaaaaaaaaaaaaaaaaaaaaaaaaaaaaaaaaaaaaaaaaaaaaaaaaaaaaaaaaaugcaucccccccccccccccccccccccccccccccaaaggcucuuuucagagccaccagaauu

SEQ ID NO: 1932 - RNA, 2520 nt, Artificial Sequence
  mRNA product Design h-5 comprising derived and/or modified sequence from YFV__NC_002031.1__SSjev(V3)-prME-XX (polyprotein: aa122-788) (wt)
gggagagggcgcuuggcuugcaaggacccugagcugcggcauugaagcacacccaacccaacucgacugaagucagccucacugaaccggaucugagaaucuucucucucugggcuugccagggcucuccgaaccuagcuagcauccucuucaauuccaacuagaaagcuuaccaugaaugaaggcucaaucauguggcucgcgagcuuggcaguugucauagcuugugcaggagccgugaccuuggugcggaaaaacagaugguugcuccuaaaugugacaucugaggaccucgggaaaacauucucugugggcacaggcaacugcacaacaaacauuuuggaagccaaguacuggugcccagacucaauggaauacaacugucccaaucucaguccaagagaggagccagaugacauugauugcuggugcuaugggguggaaaacguuagagucgcauaugguaagugugacucagcaggcaggucuaggaggucaagaagggccauugacuugccuacgcaugaaaaccaugguuugaagacccggcaagaaaaauggaugacuggaagaaugggugaaaggcaacuccaaaagauugagagaugguucgugaggaaccccuuuuuugcagugacggcucugaccauugccuaccuugugggaagcaacaugacgcaacgagucgugauugcccuacuggucuuggcuguugguccggccuacucagcucacugcauuggaauuacugacagggauuucauugagggggugcauggaggaacuuggguuucagcuacccuggagcaagacaagugugucacuguuauggccccugacaagccuucauuggacaucucacuagagacaguagccauugauagaccugcugaggugaggaaaguguguuacaaugcaguucucacucaugugaagauuaaugacaagugccccagcacuggagaggcccaccuagcugaagagaacgaaggggacaaugcgugcaagcgcacuuauucugauagaggcuggggcaauggcuguggccuauuugggaaagggagcauuguggcaugcgccaaauucacuugugccaaauccaugaguuuguuugagguugaucagaccaaaauucaguaugucaucagagcacaauugcauguaggggccaagcaggaaaauuggaauaccgacauuaagacucucaaguuugaugcccugucaggcucccaggaagucgaguucauuggguauggaaaagcuacacuggaaugccaggugcaaacugcgguggacuuugguaacaguuacaucgcugagauggaaacagagagcuggauaguggacagacagugggcccaggacuugacccugccauggcagaguggaaguggcgggguguggagagagaugcaucaucuugucgaauuugaaccuccgcaugccgccacuaucagaguacuggcccugggaaaccaggaaggcuccuugaaaacagcucuuacuggcgcaaugaggguuacaaaggacacaaaugacaacaaccuuuacaaacuacaugguggacauguuucuugcagagugaaauugucagcuuugacacucaaggggacauccuacaaaauaugcacugacaaaauguuuuuugucaagaacccaacugacacuggccauggcacuguugugaugcaggugaaagugucaaaaggagcccccugcaggauuccagugauaguagcugaugaucuuacagcggcaaucaauaaaggcauuuugguuacaguuaaccccaucgccucaaccaaugaugaugaagugcugauugaggugaacccaccuuuuggagacagcuacauuaucguugggagaggagauucacgucucacuuaccaguggcacaaagagggaagcucaauaggaaaguuguucacucagaccaugaaaggcguggaacgccuggccgucaugggagacaccgccugggauuucagcuccgcuggaggguucuucacuucgguugggaaaggaauccauacgguguuuggcucugccuuucaggggcuauuuggcggcuugaacuggauaacaaaggucaucaugggggcgguacuuauauggguuggcaucaacacaagaaacaugacaauguccaugagcaugaucuugguaggagugaucaugauguuuuugucucuaggaguuggggcggaucaaggaugcgccaucaacuuuggcaaguaaggacuaguacuggcugcaucucccuuuccucuguccuccauccuucucccaggauggugaagggggaccugguacccagugauccccaccccaggauccuaaaucaugacuuaccugcuaauaaaaacucauuggaaaagugagaagaucuaaaaaaaaaaaaaaaaaaaaaaaaaaaaaaaaaaaaaaaaaaaaaaaaaaaaaaaaaaaaaaaaugcaucccccccccccccccccccccccccccccccaaaggcucuuuucagagccaccagaauu

SEQ ID NO: 1933 - RNA, 2529 nt, Artificial Sequence
  mRNA product Design h-5 comprising derived and/or modified sequence from YFV__NC_002031.1__X-SS-prMEdelstem_TM-JEV (polyprotein: aa92-681) (opt1)
gggagagggcgcuuggcuugcaaggacccugagcugcggcauugaagcacacccaacccaacucgacugaagucagccucacugaaccggaucugagaaucuucucucucugggcuugccagggcucuccgaaccuagcuagcauccucuucaauuccaacuagaaagcuuaccaugcggggccugagcucccgcaagcggcgcagccacgacgugcucaccguccaguuccugauccuggggaugcuccugaugaccggcggggugacgcuggugcggaagaaccgcuggcuccugcugaacgucaccuccgaggaccucggcaagaccuucagcguggggaccggcaacugcacgaccaacauccuggaggccaaguacuggugccccgacuccauggaguacaacugcccgaaccugagcccccgggaggagcccgacgacaucgacugcuggugcuacggcguggagaacguccgcguggccuacgggaagugcgacuccgcgggccggagccgccggucccgccgggccaucgaccuccccacccacgagaaccacgggcugaagacccgccaggagaaguggaugacgggccggaugggggagcgccagcugcagaagaucgagcggugguucgugcgcaacccguucuucgccgucaccgcccucaccaucgccuaccuggugggcagcaacaugacccagcggguggucaucgcgcugcucgugcuggccgugggccccgccuacuccgcccacugcaucgggaucacggaccgcgacuucaucgagggcguccacgggggcaccugggugagcgcgacccuggagcaggacaagugcgugaccgucauggcccccgacaagcccucccucgacaucagccuggagacgguggccaucgaccggccggccgaggugcgcaaggucugcuacaacgccgugcugacccacgugaagaucaacgacaagugccccuccaccggcgaggcgcaccucgccgaggagaacgagggggacaacgccugcaagcggaccuacagcgaccggggcugggggaacggcugcgggcuguucggcaagggcuccaucgucgccugcgccaaguucacgugcgcgaagagcaugucccuguucgagguggaccagaccaagauccaguacgucauccgcgcccagcuccacgugggggccaagcaggagaacuggaacaccgacaucaagacccugaaguucgacgcccugagcggcagccaggagguggaguucaucggguacggcaaggccacgcucgagugccagguccagaccgcgguggacuucgggaacuccuacaucgccgagauggagaccgagagcuggaucguggaccggcagugggcccaggaccugacccugcccuggcaguccggcagcggcggggucuggcgcgagaugcaccaccucguggaguucgagcccccgcacgccgccacgauccgggugcuggcgcugggcaaccaggaggggucccucaagaccgcccugaccggcgccaugcgcgucaccaaggacacgaacgacaacaaccuguacaagcuccacgggggccacgugagcugccgggugaagcuguccgcccugacccucaagggcaccagcuacaagaucugcaccgacaagauguucuucgucaagaaccccacggacaccgggcacggcaccguggugaugcaggucaagguguccaagggggcgcccugccgcaucccggugaucgucgccgacgaccugaccgccgccaucaacaagggcauccuggugaccgugaacccgaucgccagcacgaacgacgacgagguccucaucgaggugaacccccccuucggcgacuccuacaucaucguggggcggggcgacagccgccugaccuaccaguggcacaaggagggguccagcaucggcagcacccuggggaaggccuucuccaccacgcucaagggcgcccagcgccuggcggcccugggggacaccgccugggacuucggcagcaucgggggcguguucaacuccaucggccgggccguccaccagguguucgggggcgccuuccgcacccucuucgggggcaugagcuggaucacccaggggcugaugggcgcgcugcuccuguggaugggggugaacgcccgggaccgcuccaucgcccuggccuuccucgcgacgggcggcguccugguguuccuggccaccaacgugcacgccugaggacuaguacuggcugcaucucccuuuccucuguccuccauccuucucccaggauggugaagggggaccugguacccagugauccccaccccaggauccuaaaucaugacuuaccugcuaauaaaaacucauuggaaaagugagaagaucuaaaaaaaaaaaaaaaaaaaaaaaaaaaaaaaaaaaaaaaaaaaaaaaaaaaaaaaaaaaaaaaaugcaucccccccccccccccccccccccccccccccaaaggcucuuuucagagccaccagaauu

SEQ ID NO: 1934 - RNA, 2502 nt, Artificial Sequence
  mRNA product Design h-5 comprising derived and/or modified sequence from YFV__NC_002031.1__SSjev(V3)-prMEdelstem_TM-JEV (polyprotein: aa122-681) (opt1)
gggagagggcgcuuggcuugcaaggacccugagcugcggcauugaagcacacccaacccaacucgacugaagucagccucacugaaccggaucugagaaucuucucucucugggcuugccagggcucuccgaaccuagcuagcauccucuucaauuccaacuagaaagcuuaccaugaacgagggcagcaucauguggcuggccucccucgccguggucaucgcgugcgccggggccgugacgcuggugcggaagaaccgcuggcuccugcugaacgucaccuccgaggaccucggcaagaccuucagcguggggaccggcaacugcacgaccaacauccuggaggccaaguacuggugccccgacuccauggaguacaacugcccgaaccugagcccccgggaggagcccgacgacaucgacugcuggugcuacggcguggagaacguccgcguggccuacgggaagugcgacuccgcgggccggagccgccggucccgccgggccaucgaccuccccacccacgagaaccacgggcugaagacccgccaggagaaguggaugacgggccggaugggggagcgccagcugcagaagaucgagcggugguucgugcgcaacccguucuucgccgucaccgcccucaccaucgccuaccuggugggcagcaacaugacccagcggguggucaucgcgcugcucgugcuggccgugggccccgccuacuccgcccacugcaucgggaucacggaccgcgacuucaucgagggcguccacgggggcaccugggugagcgcgacccuggagcaggacaagugcgugaccgucauggcccccgacaagcccucccucgacaucagccuggagacgguggccaucgaccggccggccgaggugcgcaaggucugcuacaacgccgugcugacccacgugaagaucaacgacaagugccccuccaccggcgaggcgcaccucgccgaggagaacgagggggacaacgccugcaagcggaccuacagcgaccggggcugggggaacggcugcgggcuguucggcaagggcuccaucgucgccugcgccaaguucacgugcgcgaagagcaugucccuguucgagguggaccagaccaagauccaguacgucauccgcgcccagcuccacgugggggccaagcaggagaacuggaacaccgacaucaagacccugaaguucgacgcccugagcggcagccaggagguggaguucaucggguacggcaaggccacgcucgagugccagguccagaccgcgguggacuucgggaacuccuacaucgccgagauggagaccgagagcuggaucguggaccggcagugggcccaggaccugacccugcccuggcaguccggcagcggcggggucuggcgcgagaugcaccaccucguggaguucgagcccccgcacgccgccacgauccgggugcuggcgcugggcaaccaggaggggucccucaagaccgcccugaccggcgccaugcgcgucaccaaggacacgaacgacaacaaccuguacaagcuccacgggggccacgugagcugccgggugaagcuguccgcccugacccucaagggcaccagcuacaagaucugcaccgacaagauguucuucgucaagaaccccacggacaccgggcacggcaccguggugaugcaggucaagguguccaagggggcgcccugccgcaucccggugaucgucgccgacgaccugaccgccgccaucaacaagggcauccuggugaccgugaacccgaucgccagcacgaacgacgacgagguccucaucgaggugaacccccccuucggcgacuccuacaucaucguggggcggggcgacagccgccugaccuaccaguggcacaaggagggguccagcaucggcagcacccuggggaaggccuucuccaccacgcucaagggcgcccagcgccuggcggcccugggggacaccgccugggacuucggcagcaucgggggcguguucaacuccaucggccgggccguccaccagguguucgggggcgccuuccgcacccucuucgggggcaugagcuggaucacccaggggcugaugggcgcgcugcuccuguggaugggggugaacgcccgggaccgcuccaucgcccuggccuuccucgcgacgggcggcguccugguguuccuggccaccaacgugcacgccugaggacuaguacuggcugcaucucccuuuccucuguccuccauccuucucccaggauggugaagggggaccugguacccagugauccccaccccaggauccuaaaucaugacuuaccugcuaauaaaaacucauuggaaaagugagaagaucuaaaaaaaaaaaaaaaaaaaaaaaaaaaaaaaaaaaaaaaaaaaaaaaaaaaaaaaaaaaaaaaaugcaucccccccccccccccccccccccccccccccaaaggcucuuuucagagccaccagaauu

SEQ ID NO: 1935 - RNA, 2517 nt, Artificial Sequence
  mRNA product Design h-5 comprising derived and/or modified sequence from YFV__NC_002031.1__X-SS-prME (polyprotein: aa92-778) (opt1)
gggagagggcgcuuggcuugcaaggacccugagcugcggcauugaagcacacccaacccaacucgacugaagucagccucacugaaccggaucugagaaucuucucucucugggcuugccagggcucuccgaaccuagcuagcauccucuucaauuccaacuagaaagcuuaccaugcggggccugagcucccgcaagcggcgcagccacgacgugcucaccguccaguuccugauccuggggaugcuccugaugaccggcggggugacgcuggugcggaagaaccgcuggcuccugcugaacgucaccuccgaggaccucggcaagaccuucagcguggggaccggcaacugcacgaccaacauccuggaggccaaguacuggugccccgacuccauggaguacaacugcccgaaccugagcccccgggaggagcccgacgacaucgacugcuggugcuacggcguggagaacguccgcguggccuacgggaagugcgacuccgcgggccggagccgccggucccgccgggccaucgaccuccccacccacgagaaccacgggcugaagacccgccaggagaaguggaugacgggccggaugggggagcgccagcugcagaagaucgagcggugguucgugcgcaacccguucuucgccgucaccgcccucaccaucgccuaccuggugggcagcaacaugacccagcggguggucaucgcgcugcucgugcuggccgugggccccgccuacuccgcccacugcaucgggaucacggaccgcgacuucaucgagggcguccacgggggcaccugggugagcgcgacccuggagcaggacaagugcgugaccgucauggcccccgacaagcccucccucgacaucagccuggagacgguggccaucgaccggccggccgaggugcgcaaggucugcuacaacgccgugcugacccacgugaagaucaacgacaagugccccuccaccggcgaggcgcaccucgccgaggagaacgagggggacaacgccugcaagcggaccuacagcgaccggggcugggggaacggcugcgggcuguucggcaagggcuccaucgucgccugcgccaaguucacgugcgcgaagagcaugucccuguucgagguggaccagaccaagauccaguacgucauccgcgcccagcuccacgugggggccaagcaggagaacuggaacaccgacaucaagacccugaaguucgacgcccugagcggcagccaggagguggaguucaucggguacggcaaggccacgcucgagugccagguccagaccgcgguggacuucgggaacuccuacaucgccgagauggagaccgagagcuggaucguggaccggcagugggcccaggaccugacccugcccuggcaguccggcagcggcggggucuggcgcgagaugcaccaccucguggaguucgagcccccgcacgccgccacgauccgggugcuggcgcugggcaaccaggaggggucccucaagaccgcccugaccggcgccaugcgcgucaccaaggacacgaacgacaacaaccuguacaagcuccacgggggccacgugagcugccgggugaagcuguccgcccugacccucaagggcaccagcuacaagaucugcaccgacaagauguucuucgucaagaaccccacggacaccgggcacggcaccguggugaugcaggucaagguguccaagggggcgcccugccgcaucccggugaucgucgccgacgaccugaccgccgccaucaacaagggcauccuggugaccgugaacccgaucgccagcacgaacgacgacgagguccucaucgaggugaacccccccuucggcgacuccuacaucaucguggggcggggcgacagccgccugaccuaccaguggcacaaggagggguccagcaucggcaagcuguucacccagaccaugaagggggucgagcggcuggcggugaugggcgacacggccugggacuucuccagcgccggcggguucuucaccuccgugggcaaggggauccacaccgucuucggcagcgccuuccaggggcucuucggcggccugaacuggaucaccaaggugaucaugggggccgugcugaucugggucggcaucaacacgcgcaacaugaccauguccaugagcaugauccucgugggggugaucaugauguuccugagccugggcgucggggcgugaggacuaguacuggcugcaucucccuuuccucuguccuccauccuucucccaggauggugaagggggaccugguacccagugauccccaccccaggauccuaaaucaugacuuaccugcuaauaaaaacucauuggaaaagugagaagaucuaaaaaaaaaaaaaaaaaaaaaaaaaaaaaaaaaaaaaaaaaaaaaaaaaaaaaaaaaaaaaaaaugcaucccccccccccccccccccccccccccccccaaaggcucuuuucagagccaccagaauu

SEQ ID NO: 1936 - RNA, 2520 nt, Artificial Sequence
  mRNA product Design h-5 comprising derived and/or modified sequence from YFV__NC_002031.1__SSjev(V3)-prME-XX (polyprotein: aa122-788) (opt1)
gggagagggcgcuuggcuugcaaggacccugagcugcggcauugaagcacacccaacccaacucgacugaagucagccucacugaaccggaucugagaaucuucucucucugggcuugccagggcucuccgaaccuagcuagcauccucuucaauuccaacuagaaagcuuaccaugaacgagggcagcaucauguggcuggccucccucgccguggucaucgcgugcgccggggccgugacgcuggugcggaagaaccgcuggcuccugcugaacgucaccuccgaggaccucggcaagaccuucagcguggggaccggcaacugcacgaccaacauccuggaggccaaguacuggugccccgacuccauggaguacaacugcccgaaccugagcccccgggaggagcccgacgacaucgacugcuggugcuacggcguggagaacguccgcguggccuacgggaagugcgacuccgcgggccggagccgccggucccgccgggccaucgaccuccccacccacgagaaccacgggcugaagacccgccaggagaaguggaugacgggccggaugggggagcgccagcugcagaagaucgagcggugguucgugcgcaacccguucuucgccgucaccgcccucaccaucgccuaccuggugggcagcaacaugacccagcggguggucaucgcgcugcucgugcuggccgugggccccgccuacuccgcccacugcaucgggaucacggaccgcgacuucaucgagggcguccacgggggcaccugggugagcgcgacccuggagcaggacaagugcgugaccgucauggcccccgacaagcccucccucgacaucagccuggagacgguggccaucgaccggccggccgaggugcgcaaggucugcuacaacgccgugcugacccacgugaagaucaacgacaagugccccuccaccggcgaggcgcaccucgccgaggagaacgagggggacaacgccugcaagcggaccuacagcgaccggggcugggggaacggcugcgggcuguucggcaagggcuccaucgucgccugcgccaaguucacgugcgcgaagagcaugucccuguucgagguggaccagaccaagauccaguacgucauccgcgcccagcuccacgugggggccaagcaggagaacuggaacaccgacaucaagacccugaaguucgacgcccugagcggcagccaggagguggaguucaucggguacggcaaggccacgcucgagugccagguccagaccgcgguggacuucgggaacuccuacaucgccgagauggagaccgagagcuggaucguggaccggcagugggcccaggaccugacccugcccuggcaguccggcagcggcggggucuggcgcgagaugcaccaccucguggaguucgagcccccgcacgccgccacgauccgggugcuggcgcugggcaaccaggaggggucccucaagaccgcccugaccggcgccaugcgcgucaccaaggacacgaacgacaacaaccuguacaagcuccacgggggccacgugagcugccgggugaagcuguccgcccugacccucaagggcaccagcuacaagaucugcaccgacaagauguucuucgucaagaaccccacggacaccgggcacggcaccguggugaugcaggucaagguguccaagggggcgcccugccgcaucccggugaucgucgccgacgaccugaccgccgccaucaacaagggcauccuggugaccgugaacccgaucgccagcacgaacgacgacgagguccucaucgaggugaacccccccuucggcgacuccuacaucaucguggggcggggcgacagccgccugaccuaccaguggcacaaggagggguccagcaucggcaagcuguucacccagaccaugaagggggucgagcggcuggcggugaugggcgacacggccugggacuucuccagcgccggcggguucuucaccuccgugggcaaggggauccacaccgucuucggcagcgccuuccaggggcucuucggcggccugaacuggaucaccaaggugaucaugggggccgugcugaucugggucggcaucaacacgcgcaacaugaccauguccaugagcaugauccucgugggggugaucaugauguuccugagccugggcgucggggcggaccagggcugcgccaucaacuucggcaagugaggacuaguacuggcugcaucucccuuuccucuguccuccauccuucucccaggauggugaagggggaccugguacccagugauccccaccccaggauccuaaaucaugacuuaccugcuaauaaaaacucauuggaaaagugagaagaucuaaaaaaaaaaaaaaaaaaaaaaaaaaaaaaaaaaaaaaaaaaaaaaaaaaaaaaaaaaaaaaaaugcaucccccccccccccccccccccccccccccccaaaggcucuuuucagagccaccagaauu

SEQ ID NO: 1937 - RNA, 2529 nt, Artificial Sequence
  mRNA product Design h-5 comprising derived and/or modified sequence from YFV__NC_002031.1__X-SS-prMEdelstem_TM-JEV (polyprotein: aa92-681) (opt1)
gggagagggcgcuuggcuugcaaggacccugagcugcggcauugaagcacacccaacccaacucgacugaagucagccucacugaaccggaucugagaaucuucucucucugggcuugccagggcucuccgaaccuagcuagcauccucuucaauuccaacuagaaagcuuaccaugcggggccugagcucccgcaagcggcgcagccacgacgugcucaccguccaguuccugauccuggggaugcuccugaugaccggcggggugacgcuggugcggaagaaccgcuggcuccugcugaacgucaccuccgaggaccucggcaagaccuucagcguggggaccggcaacugcacgaccaacauccuggaggccaaguacuggugccccgacuccauggaguacaacugcccgaaccugagcccccgggaggagcccgacgacaucgacugcuggugcuacggcguggagaacguccgcguggccuacgggaagugcgacuccgcgggccggagccgccggucccgccgggccaucgaccuccccacccacgagaaccacgggcugaagacccgccaggagaaguggaugacgggccggaugggggagcgccagcugcagaagaucgagcggugguucgugcgcaacccguucuucgccgucaccgcccucaccaucgccuaccuggugggcagcaacaugacccagcggguggucaucgcgcugcucgugcuggccgugggccccgccuacuccgcccacugcaucgggaucacggaccgcgacuucaucgagggcguccacgggggcaccugggugagcgcgacccuggagcaggacaagugcgugaccgucauggcccccgacaagcccucccucgacaucagccuggagacgguggccaucgaccggccggccgaggugcgcaaggucugcuacaacgccgugcugacccacgugaagaucaacgacaagugccccuccaccggcgaggcgcaccucgccgaggagaacgagggggacaacgccugcaagcggaccuacagcgaccggggcugggggaacggcugcgggcuguucggcaagggcuccaucgucgccugcgccaaguucacgugcgcgaaguccaugagccuguucgagguggaccagaccaagauccaguacgucauccgcgcccagcuccacgugggggccaagcaggagaacuggaacaccgacaucaagacccugaaguucgacgcccugagcggcagccaggagguggaguucaucggguacggcaaggccacgcucgagugccagguccagaccgcgguggacuucgggaacuccuacaucgccgagauggagaccgagagcuggaucguggaccggcagugggcccaggaccugacccugcccuggcaguccggcagcggcggggucuggcgcgagaugcaccaccucguggaguucgagcccccgcacgccgccacgauccgggugcuggcgcugggcaaccaggaggggucccucaagaccgcccugaccggcgccaugcgcgucaccaaggacacgaacgacaacaaccuguacaagcuccacgggggccacgugagcugccgggugaagcuguccgcccugacccucaagggcaccagcuacaagaucugcaccgacaagauguucuucgucaagaaccccacggacaccgggcacggcaccguggugaugcaggucaagguguccaagggggcgcccugccgcaucccggugaucgucgccgacgaccugaccgccgccaucaacaagggcauccuggugaccgugaacccgaucgccagcacgaacgacgacgagguccucaucgaggugaacccccccuucggcgacuccuacaucaucguggggcggggcgacagccgccugaccuaccaguggcacaaggagggguccagcaucggcagcacccuggggaaggccuucuccaccacgcucaagggcgcccagcgccuggcggcccugggggacaccgccugggacuucggcagcaucgggggcguguucaacuccaucggccgggccguccaccagguguucgggggcgccuuccgcacccucuucgggggcaugagcuggaucacccaggggcugaugggcgcgcugcuccuguggaugggggugaacgcccgggaccgcuccaucgcccuggccuuccucgcgacgggcggcguccugguguuccuggccaccaacgugcacgccugaggacuaguacuggcugcaucucccuuuccucuguccuccauccuucucccaggauggugaagggggaccugguacccagugauccccaccccaggauccuaaaucaugacuuaccugcuaauaaaaacucauuggaaaagugagaagaucuaaaaaaaaaaaaaaaaaaaaaaaaaaaaaaaaaaaaaaaaaaaaaaaaaaaaaaaaaaaaaaaaugcaucccccccccccccccccccccccccccccccaaaggcucuuuucagagccaccagaauu

SEQ ID NO: 1938 - RNA, 2502 nt, Artificial Sequence
  mRNA product Design h-5 comprising derived and/or modified sequence from YFV__NC_002031.1__SSjev(V3)-prMEdelstem_TM-JEV (polyprotein: aa122-681) (opt1)
gggagagggcgcuuggcuugcaaggacccugagcugcggcauugaagcacacccaacccaacucgacugaagucagccucacugaaccggaucugagaaucuucucucucugggcuugccagggcucuccgaaccuagcuagcauccucuucaauuccaacuagaaagcuuaccaugaacgagggcagcaucauguggcuggccucccucgccguggucaucgcgugcgccggggccgugacgcuggugcggaagaaccgcuggcuccugcugaacgucaccuccgaggaccucggcaagaccuucagcguggggaccggcaacugcacgaccaacauccuggaggccaaguacuggugccccgacuccauggaguacaacugcccgaaccugagcccccgggaggagcccgacgacaucgacugcuggugcuacggcguggagaacguccgcguggccuacgggaagugcgacuccgcgggccggagccgccggucccgccgggccaucgaccuccccacccacgagaaccacgggcugaagacccgccaggagaaguggaugacgggccggaugggggagcgccagcugcagaagaucgagcggugguucgugcgcaacccguucuucgccgucaccgcccucaccaucgccuaccuggugggcagcaacaugacccagcggguggucaucgcgcugcucgugcuggccgugggccccgccuacuccgcccacugcaucgggaucacggaccgcgacuucaucgagggcguccacgggggcaccugggugagcgcgacccuggagcaggacaagugcgugaccgucauggcccccgacaagcccucccucgacaucagccuggagacgguggccaucgaccggccggccgaggugcgcaaggucugcuacaacgccgugcugacccacgugaagaucaacgacaagugccccuccaccggcgaggcgcaccucgccgaggagaacgagggggacaacgccugcaagcggaccuacagcgaccggggcugggggaacggcugcgggcuguucggcaagggcuccaucgucgccugcgccaaguucacgugcgcgaaguccaugagccuguucgagguggaccagaccaagauccaguacgucauccgcgcccagcuccacgugggggccaagcaggagaacuggaacaccgacaucaagacccugaaguucgacgcccugagcggcagccaggagguggaguucaucggguacggcaaggccacgcucgagugccagguccagaccgcgguggacuucgggaacuccuacaucgccgagauggagaccgagagcuggaucguggaccggcagugggcccaggaccugacccugcccuggcaguccggcagcggcggggucuggcgcgagaugcaccaccucguggaguucgagcccccgcacgccgccacgauccgggugcuggcgcugggcaaccaggaggggucccucaagaccgcccugaccggcgccaugcgcgucaccaaggacacgaacgacaacaaccuguacaagcuccacgggggccacgugagcugccgggugaagcuguccgcccugacccucaagggcaccagcuacaagaucugcaccgacaagauguucuucgucaagaaccccacggacaccgggcacggcaccguggugaugcaggucaagguguccaagggggcgcccugccgcaucccggugaucgucgccgacgaccugaccgccgccaucaacaagggcauccuggugaccgugaacccgaucgccagcacgaacgacgacgagguccucaucgaggugaacccccccuucggcgacuccuacaucaucguggggcggggcgacagccgccugaccuaccaguggcacaaggagggguccagcaucggcagcacccuggggaaggccuucuccaccacgcucaagggcgcccagcgccuggcggcccugggggacaccgccugggacuucggcagcaucgggggcguguucaacuccaucggccgggccguccaccagguguucgggggcgccuuccgcacccucuucgggggcaugagcuggaucacccaggggcugaugggcgcgcugcuccuguggaugggggugaacgcccgggaccgcuccaucgcccuggccuuccucgcgacgggcggcguccugguguuccuggccaccaacgugcacgccugaggacuaguacuggcugcaucucccuuuccucuguccuccauccuucucccaggauggugaagggggaccugguacccagugauccccaccccaggauccuaaaucaugacuuaccugcuaauaaaaacucauuggaaaagugagaagaucuaaaaaaaaaaaaaaaaaaaaaaaaaaaaaaaaaaaaaaaaaaaaaaaaaaaaaaaaaaaaaaaaugcaucccccccccccccccccccccccccccccccaaaggcucuuuucagagccaccagaauu

SEQ ID NO: 1939 - RNA, 2517 nt, Artificial Sequence
  mRNA product Design h-5 comprising derived and/or modified sequence from YFV__NC_002031.1__X-SS-prME (polyprotein: aa92-778) (opt1)
gggagagggcgcuuggcuugcaaggacccugagcugcggcauugaagcacacccaacccaacucgacugaagucagccucacugaaccggaucugagaaucuucucucucugggcuugccagggcucuccgaaccuagcuagcauccucuucaauuccaacuagaaagcuuaccaugcggggccugagcucccgcaagcggcgcagccacgacgugcucaccguccaguuccugauccuggggaugcuccugaugaccggcggggugacgcuggugcggaagaaccgcuggcuccugcugaacgucaccuccgaggaccucggcaagaccuucagcguggggaccggcaacugcacgaccaacauccuggaggccaaguacuggugccccgacuccauggaguacaacugcccgaaccugagcccccgggaggagcccgacgacaucgacugcuggugcuacggcguggagaacguccgcguggccuacgggaagugcgacuccgcgggccggagccgccggucccgccgggccaucgaccuccccacccacgagaaccacgggcugaagacccgccaggagaaguggaugacgggccggaugggggagcgccagcugcagaagaucgagcggugguucgugcgcaacccguucuucgccgucaccgcccucaccaucgccuaccuggugggcagcaacaugacccagcggguggucaucgcgcugcucgugcuggccgugggccccgccuacuccgcccacugcaucgggaucacggaccgcgacuucaucgagggcguccacgggggcaccugggugagcgcgacccuggagcaggacaagugcgugaccgucauggcccccgacaagcccucccucgacaucagccuggagacgguggccaucgaccggccggccgaggugcgcaaggucugcuacaacgccgugcugacccacgugaagaucaacgacaagugccccuccaccggcgaggcgcaccucgccgaggagaacgagggggacaacgccugcaagcggaccuacagcgaccggggcugggggaacggcugcgggcuguucggcaagggcuccaucgucgccugcgccaaguucacgugcgcgaaguccaugagccuguucgagguggaccagaccaagauccaguacgucauccgcgcccagcuccacgugggggccaagcaggagaacuggaacaccgacaucaagacccugaaguucgacgcccugagcggcagccaggagguggaguucaucggguacggcaaggccacgcucgagugccagguccagaccgcgguggacuucgggaacuccuacaucgccgagauggagaccgagagcuggaucguggaccggcagugggcccaggaccugacccugcccuggcaguccggcagcggcggggucuggcgcgagaugcaccaccucguggaguucgagcccccgcacgccgccacgauccgggugcuggcgcugggcaaccaggaggggucccucaagaccgcccugaccggcgccaugcgcgucaccaaggacacgaacgacaacaaccuguacaagcuccacgggggccacgugagcugccgggugaagcuguccgcccugacccucaagggcaccagcuacaagaucugcaccgacaagauguucuucgucaagaaccccacggacaccgggcacggcaccguggugaugcaggucaagguguccaagggggcgcccugccgcaucccggugaucgucgccgacgaccugaccgccgccaucaacaagggcauccuggugaccgugaacccgaucgccagcacgaacgacgacgagguccucaucgaggugaacccccccuucggcgacuccuacaucaucguggggcggggcgacagccgccugaccuaccaguggcacaaggagggguccagcaucggcaagcuguucacccagaccaugaagggggucgagcggcuggcggugaugggcgacacggccugggacuucuccagcgccggcggguucuucaccuccgugggcaaggggauccacaccgucuucggcagcgccuuccaggggcuguucggcggccucaacuggaucaccaaggugaucaugggggccgugcugaucugggucggcaucaacacgcgcaacaugaccauguccaugagcaugauccucgugggggugaucaugauguuccugagccugggcgucggggcgugaggacuaguacuggcugcaucucccuuuccucuguccuccauccuucucccaggauggugaagggggaccugguacccagugauccccaccccaggauccuaaaucaugacuuaccugcuaauaaaaacucauuggaaaagugagaagaucuaaaaaaaaaaaaaaaaaaaaaaaaaaaaaaaaaaaaaaaaaaaaaaaaaaaaaaaaaaaaaaaaugcaucccccccccccccccccccccccccccccccaaaggcucuuuucagagccaccagaauu

SEQ ID NO: 1940 - RNA, 2520 nt, Artificial Sequence
  mRNA product Design h-5 comprising derived and/or modified sequence from YFV__NC_002031.1__SSjev(V3)-prME-XX (polyprotein: aa122-788) (opt1)
gggagagggcgcuuggcuugcaaggacccugagcugcggcauugaagcacacccaacccaacucgacugaagucagccucacugaaccggaucugagaaucuucucucucugggcuugccagggcucuccgaaccuagcuagcauccucuucaauuccaacuagaaagcuuaccaugaacgagggcagcaucauguggcuggccucccucgccguggucaucgcgugcgccggggccgugacgcuggugcggaagaaccgcuggcuccugcugaacgucaccuccgaggaccucggcaagaccuucagcguggggaccggcaacugcacgaccaacauccuggaggccaaguacuggugccccgacuccauggaguacaacugcccgaaccugagcccccgggaggagcccgacgacaucgacugcuggugcuacggcguggagaacguccgcguggccuacgggaagugcgacuccgcgggccggagccgccggucccgccgggccaucgaccuccccacccacgagaaccacgggcugaagacccgccaggagaaguggaugacgggccggaugggggagcgccagcugcagaagaucgagcggugguucgugcgcaacccguucuucgccgucaccgcccucaccaucgccuaccuggugggcagcaacaugacccagcggguggucaucgcgcugcucgugcuggccgugggccccgccuacuccgcccacugcaucgggaucacggaccgcgacuucaucgagggcguccacgggggcaccugggugagcgcgacccuggagcaggacaagugcgugaccgucauggcccccgacaagcccucccucgacaucagccuggagacgguggccaucgaccggccggccgaggugcgcaaggucugcuacaacgccgugcugacccacgugaagaucaacgacaagugccccuccaccggcgaggcgcaccucgccgaggagaacgagggggacaacgccugcaagcggaccuacagcgaccggggcugggggaacggcugcgggcuguucggcaagggcuccaucgucgccugcgccaaguucacgugcgcgaaguccaugagccuguucgagguggaccagaccaagauccaguacgucauccgcgcccagcuccacgugggggccaagcaggagaacuggaacaccgacaucaagacccugaaguucgacgcccugagcggcagccaggagguggaguucaucggguacggcaaggccacgcucgagugccagguccagaccgcgguggacuucgggaacuccuacaucgccgagauggagaccgagagcuggaucguggaccggcagugggcccaggaccugacccugcccuggcaguccggcagcggcggggucuggcgcgagaugcaccaccucguggaguucgagcccccgcacgccgccacgauccgggugcuggcgcugggcaaccaggaggggucccucaagaccgcccugaccggcgccaugcgcgucaccaaggacacgaacgacaacaaccuguacaagcuccacgggggccacgugagcugccgggugaagcuguccgcccugacccucaagggcaccagcuacaagaucugcaccgacaagauguucuucgucaagaaccccacggacaccgggcacggcaccguggugaugcaggucaagguguccaagggggcgcccugccgcaucccggugaucgucgccgacgaccugaccgccgccaucaacaagggcauccuggugaccgugaacccgaucgccagcacgaacgacgacgagguccucaucgaggugaacccccccuucggcgacuccuacaucaucguggggcggggcgacagccgccugaccuaccaguggcacaaggagggguccagcaucggcaagcuguucacccagaccaugaagggggucgagcggcuggcggugaugggcgacacggccugggacuucuccagcgccggcggguucuucaccuccgugggcaaggggauccacaccgucuucggcagcgccuuccaggggcuguucggcggccucaacuggaucaccaaggugaucaugggggccgugcugaucugggucggcaucaacacgcgcaacaugaccauguccaugagcaugauccucgugggggugaucaugauguuccugagccugggcgucggggcggaccagggcugcgccaucaacuucggcaagugaggacuaguacuggcugcaucucccuuuccucuguccuccauccuucucccaggauggugaagggggaccugguacccagugauccccaccccaggauccuaaaucaugacuuaccugcuaauaaaaacucauuggaaaagugagaagaucuaaaaaaaaaaaaaaaaaaaaaaaaaaaaaaaaaaaaaaaaaaaaaaaaaaaaaaaaaaaaaaaaugcaucccccccccccccccccccccccccccccccaaaggcucuuuucagagccaccagaauu

SEQ ID NO: 1941 - RNA, 2529 nt, Artificial Sequence
  mRNA product Design h-5 comprising derived and/or modified sequence from YFV__NC_002031.1__X-SS-prMEdelstem_TM-JEV (polyprotein: aa92-681) (opt1)
gggagagggcgcuuggcuugcaaggacccugagcugcggcauugaagcacacccaacccaacucgacugaagucagccucacugaaccggaucugagaaucuucucucucugggcuugccagggcucuccgaaccuagcuagcauccucuucaauuccaacuagaaagcuuaccaugcggggccugagcucccgcaagcggcgcagccacgacgugcucaccguccaguuccugauccuggggaugcuccugaugaccggcggggugacgcuggugcggaagaaccgcuggcuccugcugaacgucaccuccgaggaccucggcaagaccuucagcguggggaccggcaacugcacgaccaacauccuggaggccaaguacuggugccccgacuccauggaguacaacugccccaaccugagcccccgggaggagcccgacgacaucgacugcuggugcuacggcguggagaacguccgcguggccuacgggaagugcgacuccgcgggccggagccgccggucccgccgggccaucgaccuccccacccacgagaaccacgggcugaagacccgccaggagaaguggaugacgggccggaugggggagcgccagcugcagaagaucgagcggugguucgugcgcaacccguucuucgccgucaccgcccucaccaucgccuaccuggugggcagcaacaugacccagcggguggucaucgcgcugcucgugcuggccgugggccccgccuacuccgcccacugcaucgggaucacggaccgcgacuucaucgagggcguccacgggggcaccugggugagcgcgacccuggagcaggacaagugcgugaccgucauggcccccgacaagcccucccucgacaucagccuggagacgguggccaucgaccggccggccgaggugcgcaaggucugcuacaacgccgugcugacccacgugaagaucaacgacaagugccccuccaccggcgaggcgcaccucgccgaggagaacgagggggacaacgccugcaagcggaccuacagcgaccggggcugggggaacggcugcgggcuguucggcaagggcuccaucgucgccugcgccaaguucacgugcgcgaaguccaugagccuguucgagguggaccagaccaagauccaguacgucauccgcgcccagcuccacgugggggccaagcaggagaacuggaacaccgacaucaagacccugaaguucgacgcccugagcggcagccaggagguggaguucaucggguacggcaaggccacgcucgagugccagguccagaccgcgguggacuucgggaacuccuacaucgccgagauggagaccgagagcuggaucguggaccggcagugggcccaggaccugacccugcccuggcaguccggcagcggcggggucuggcgcgagaugcaccaccucguggaguucgagcccccgcacgccgccacgauccgggugcuggcgcugggcaaccaggaggggucccucaagaccgcccugaccggcgccaugcgcgucaccaaggacacgaacgacaacaaccuguacaagcuccacgggggccacgugagcugccgggugaagcuguccgcccugacccucaagggcaccagcuacaagaucugcaccgacaagauguucuucgucaagaaccccacggacaccgggcacggcaccguggugaugcaggucaagguguccaagggggcgcccugccgcaucccggugaucgucgccgacgaccugaccgccgccaucaacaagggcauccuggugaccgugaacccgaucgccagcacgaacgacgacgagguccucaucgaggugaacccgcccuucggcgacuccuacaucaucguggggcggggcgacagccgccugaccuaccaguggcacaaggagggguccagcaucggaagcacgcugggcaaggccuuuucaacaacuuugaagggagcucaaagacuggcagcguugggcgacacagccugggacuuuggcucuauuggaggggucuucaacuccauagguagagccguucaccaaguguuuggaggugccuucagaacacucuuugggggaaugucuuggaucacacaagggcuaaugggugcccuacugcucuggaugggcgucaacgcacgagaccgaucaauugcuuuggccuucuuagccacaggaggugugcucguguucuuagcgaccaaugugcacgccugaggacuaguacuggcugcaucucccuuuccucuguccuccauccuucucccaggauggugaagggggaccugguacccagugauccccaccccaggauccuaaaucaugacuuaccugcuaauaaaaacucauuggaaaagugagaagaucuaaaaaaaaaaaaaaaaaaaaaaaaaaaaaaaaaaaaaaaaaaaaaaaaaaaaaaaaaaaaaaaaugcaucccccccccccccccccccccccccccccccaaaggcucuuuucagagccaccagaauu

SEQ ID NO: 1942 - RNA, 2502 nt, Artificial Sequence
  mRNA product Design h-5 comprising derived and/or modified sequence from YFV__NC_002031.1__SSjev(V3)-prMEdelstem_TM-JEV (polyprotein: aa122-681) (opt1)
gggagagggcgcuuggcuugcaaggacccugagcugcggcauugaagcacacccaacccaacucgacugaagucagccucacugaaccggaucugagaaucuucucucucugggcuugccagggcucuccgaaccuagcuagcauccucuucaauuccaacuagaaagcuuaccaugaacgagggcagcaucauguggcuggccucccucgccguggucaucgcgugcgccggggccgugacgcuggugcggaagaaccgcuggcuccugcugaacgucaccuccgaggaccucggcaagaccuucagcguggggaccggcaacugcacgaccaacauccuggaggccaaguacuggugccccgacuccauggaguacaacugccccaaccugagcccccgggaggagcccgacgacaucgacugcuggugcuacggcguggagaacguccgcguggccuacgggaagugcgacuccgcgggccggagccgccggucccgccgggccaucgaccuccccacccacgagaaccacgggcugaagacccgccaggagaaguggaugacgggccggaugggggagcgccagcugcagaagaucgagcggugguucgugcgcaacccguucuucgccgucaccgcccucaccaucgccuaccuggugggcagcaacaugacccagcggguggucaucgcgcugcucgugcuggccgugggccccgccuacuccgcccacugcaucgggaucacggaccgcgacuucaucgagggcguccacgggggcaccugggugagcgcgacccuggagcaggacaagugcgugaccgucauggcccccgacaagcccucccucgacaucagccuggagacgguggccaucgaccggccggccgaggugcgcaaggucugcuacaacgccgugcugacccacgugaagaucaacgacaagugccccuccaccggcgaggcgcaccucgccgaggagaacgagggggacaacgccugcaagcggaccuacagcgaccggggcugggggaacggcugcgggcuguucggcaagggcuccaucgucgccugcgccaaguucacgugcgcgaaguccaugagccuguucgagguggaccagaccaagauccaguacgucauccgcgcccagcuccacgugggggccaagcaggagaacuggaacaccgacaucaagacccugaaguucgacgcccugagcggcagccaggagguggaguucaucggguacggcaaggccacgcucgagugccagguccagaccgcgguggacuucgggaacuccuacaucgccgagauggagaccgagagcuggaucguggaccggcagugggcccaggaccugacccugcccuggcaguccggcagcggcggggucuggcgcgagaugcaccaccucguggaguucgagcccccgcacgccgccacgauccgggugcuggcgcugggcaaccaggaggggucccucaagaccgcccugaccggcgccaugcgcgucaccaaggacacgaacgacaacaaccuguacaagcuccacgggggccacgugagcugccgggugaagcuguccgcccugacccucaagggcaccagcuacaagaucugcaccgacaagauguucuucgucaagaaccccacggacaccgggcacggcaccguggugaugcaggucaagguguccaagggggcgcccugccgcaucccggugaucgucgccgacgaccugaccgccgccaucaacaagggcauccuggugaccgugaacccgaucgccagcacgaacgacgacgagguccucaucgaggugaacccgcccuucggcgacuccuacaucaucguggggcggggcgacagccgccugaccuaccaguggcacaaggagggguccagcaucggcagcacccuggggaaggccuucuccaccacgcucaagggcgcccagcgccuggcggcccugggggacaccgccugggacuucggcagcaucgggggcguguucaacuccaucggccgggccguccaccagguguucgggggcgccuuccgcacccucuucgggggcaugagcuggaucacccaggggcugaugggcgcgcugcuccuguggaugggggugaacgcccgggaccgcuccaucgcccuggccuuccucgcgacgggcggcguccugguguuccuggccaccaacgugcacgccugaggacuaguacuggcugcaucucccuuuccucuguccuccauccuucucccaggauggugaagggggaccugguacccagugauccccaccccaggauccuaaaucaugacuuaccugcuaauaaaaacucauuggaaaagugagaagaucuaaaaaaaaaaaaaaaaaaaaaaaaaaaaaaaaaaaaaaaaaaaaaaaaaaaaaaaaaaaaaaaaugcaucccccccccccccccccccccccccccccccaaaggcucuuuucagagccaccagaauu

SEQ ID NO: 1943 - RNA, 2517 nt, Artificial Sequence
  mRNA product Design h-5 comprising derived and/or modified sequence from YFV__NC_002031.1__X-SS-prME (polyprotein: aa92-778) (opt1)
gggagagggcgcuuggcuugcaaggacccugagcugcggcauugaagcacacccaacccaacucgacugaagucagccucacugaaccggaucugagaaucuucucucucugggcuugccagggcucuccgaaccuagcuagcauccucuucaauuccaacuagaaagcuuaccaugcggggccugagcucccgcaagcggcgcagccacgacgugcucaccguccaguuccugauccuggggaugcuccugaugaccggcggggugacgcuggugcggaagaaccgcuggcuccugcugaacgucaccuccgaggaccucggcaagaccuucagcguggggaccggcaacugcacgaccaacauccuggaggccaaguacuggugccccgacuccauggaguacaacugccccaaccugagcccccgggaggagcccgacgacaucgacugcuggugcuacggcguggagaacguccgcguggccuacgggaagugcgacuccgcgggccggagccgccggucccgccgggccaucgaccuccccacccacgagaaccacgggcugaagacccgccaggagaaguggaugacgggccggaugggggagcgccagcugcagaagaucgagcggugguucgugcgcaacccguucuucgccgucaccgcccucaccaucgccuaccuggugggcagcaacaugacccagcggguggucaucgcgcugcucgugcuggccgugggccccgccuacuccgcccacugcaucgggaucacggaccgcgacuucaucgagggcguccacgggggcaccugggugagcgcgacccuggagcaggacaagugcgugaccgucauggcccccgacaagcccucccucgacaucagccuggagacgguggccaucgaccggccggccgaggugcgcaaggucugcuacaacgccgugcugacccacgugaagaucaacgacaagugccccuccaccggcgaggcgcaccucgccgaggagaacgagggggacaacgccugcaagcggaccuacagcgaccggggcugggggaacggcugcgggcuguucggcaagggcuccaucgucgccugcgccaaguucacgugcgcgaaguccaugagccuguucgagguggaccagaccaagauccaguacgucauccgcgcccagcuccacgugggggccaagcaggagaacuggaacaccgacaucaagacccugaaguucgacgcccugagcggcagccaggagguggaguucaucggguacggcaaggccacgcucgagugccagguccagaccgcgguggacuucgggaacuccuacaucgccgagauggagaccgagagcuggaucguggaccggcagugggcccaggaccugacccugcccuggcaguccggcagcggcggggucuggcgcgagaugcaccaccucguggaguucgagcccccgcacgccgccacgauccgggugcuggcgcugggcaaccaggaggggucccucaagaccgcccugaccggcgccaugcgcgucaccaaggacacgaacgacaacaaccuguacaagcuccacgggggccacgugagcugccgggugaagcuguccgcccugacccucaagggcaccagcuacaagaucugcaccgacaagauguucuucgucaagaaccccacggacaccgggcacggcaccguggugaugcaggucaagguguccaagggggcgcccugccgcaucccggugaucgucgccgacgaccugaccgccgccaucaacaagggcauccuggugaccgugaacccgaucgccagcacgaacgacgacgagguccucaucgaggugaacccgcccuucggcgacuccuacaucaucguggggcggggcgacagccgccugaccuaccaguggcacaaggagggguccagcaucggcaagcuguucacccagaccaugaagggggucgagcggcuggcggugaugggcgacacggccugggacuucuccagcgccggcggguucuucaccuccgugggcaaggggauccacaccgucuucggcagcgccuuccaggggcuguucggcggccucaacuggaucaccaaggugaucaugggggccgugcugaucugggucggcaucaacacgcgcaacaugaccauguccaugagcaugauccucgugggggugaucaugauguuccugagccugggcgucggggcgugaggacuaguacuggcugcaucucccuuuccucuguccuccauccuucucccaggauggugaagggggaccugguacccagugauccccaccccaggauccuaaaucaugacuuaccugcuaauaaaaacucauuggaaaagugagaagaucuaaaaaaaaaaaaaaaaaaaaaaaaaaaaaaaaaaaaaaaaaaaaaaaaaaaaaaaaaaaaaaaaugcaucccccccccccccccccccccccccccccccaaaggcucuuuucagagccaccagaauu

SEQ ID NO: 1944 - RNA, 2520 nt, Artificial Sequence
  mRNA product Design h-5 comprising derived and/or modified sequence from YFV__NC_002031.1__SSjev(V3)-prME-XX (polyprotein: aa122-788) (opt1)
gggagagggcgcuuggcuugcaaggacccugagcugcggcauugaagcacacccaacccaacucgacugaagucagccucacugaaccggaucugagaaucuucucucucugggcuugccagggcucuccgaaccuagcuagcauccucuucaauuccaacuagaaagcuuaccaugaacgagggcagcaucauguggcuggccucccucgccguggucaucgcgugcgccggggccgugacgcuggugcggaagaaccgcuggcuccugcugaacgucaccuccgaggaccucggcaagaccuucagcguggggaccggcaacugcacgaccaacauccuggaggccaaguacuggugccccgacuccauggaguacaacugccccaaccugagcccccgggaggagcccgacgacaucgacugcuggugcuacggcguggagaacguccgcguggccuacgggaagugcgacuccgcgggccggagccgccggucccgccgggccaucgaccuccccacccacgagaaccacgggcugaagacccgccaggagaaguggaugacgggccggaugggggagcgccagcugcagaagaucgagcggugguucgugcgcaacccguucuucgccgucaccgcccucaccaucgccuaccuggugggcagcaacaugacccagcggguggucaucgcgcugcucgugcuggccgugggccccgccuacuccgcccacugcaucgggaucacggaccgcgacuucaucgagggcguccacgggggcaccugggugagcgcgacccuggagcaggacaagugcgugaccgucauggcccccgacaagcccucccucgacaucagccuggagacgguggccaucgaccggccggccgaggugcgcaaggucugcuacaacgccgugcugacccacgugaagaucaacgacaagugccccuccaccggcgaggcgcaccucgccgaggagaacgagggggacaacgccugcaagcggaccuacagcgaccggggcugggggaacggcugcgggcuguucggcaagggcuccaucgucgccugcgccaaguucacgugcgcgaaguccaugagccuguucgagguggaccagaccaagauccaguacgucauccgcgcccagcuccacgugggggccaagcaggagaacuggaacaccgacaucaagacccugaaguucgacgcccugagcggcagccaggagguggaguucaucggguacggcaaggccacgcucgagugccagguccagaccgcgguggacuucgggaacuccuacaucgccgagauggagaccgagagcuggaucguggaccggcagugggcccaggaccugacccugcccuggcaguccggcagcggcggggucuggcgcgagaugcaccaccucguggaguucgagcccccgcacgccgccacgauccgggugcuggcgcugggcaaccaggaggggucccucaagaccgcccugaccggcgccaugcgcgucaccaaggacacgaacgacaacaaccuguacaagcuccacgggggccacgugagcugccgggugaagcuguccgcccugacccucaagggcaccagcuacaagaucugcaccgacaagauguucuucgucaagaaccccacggacaccgggcacggcaccguggugaugcaggucaagguguccaagggggcgcccugccgcaucccggugaucgucgccgacgaccugaccgccgccaucaacaagggcauccuggugaccgugaacccgaucgccagcacgaacgacgacgagguccucaucgaggugaacccgcccuucggcgacuccuacaucaucguggggcggggcgacagccgccugaccuaccaguggcacaaggagggguccagcaucggcaagcuguucacccagaccaugaagggggucgagcggcuggcggugaugggcgacacggccugggacuucuccagcgccggcggguucuucaccuccgugggcaaggggauccacaccgucuucggcagcgccuuccaggggcuguucggcggccucaacuggaucaccaaggugaucaugggggccgugcugaucugggucggcaucaacacgcgcaacaugaccauguccaugagcaugauccucgugggggugaucaugauguuccugagccugggcgucggggcggaccagggcugcgccaucaacuucggcaagugaggacuaguacuggcugcaucucccuuuccucuguccuccauccuucucccaggauggugaagggggaccugguacccagugauccccaccccaggauccuaaaucaugacuuaccugcuaauaaaaacucauuggaaaagugagaagaucuaaaaaaaaaaaaaaaaaaaaaaaaaaaaaaaaaaaaaaaaaaaaaaaaaaaaaaaaaaaaaaaaugcaucccccccccccccccccccccccccccccccaaaggcucuuuucagagccaccagaauu

SEQ ID NO: 1945 - RNA, 2529 nt, Artificial Sequence
  mRNA product Design h-5 comprising derived and/or modified sequence from YFV__NC_002031.1__X-SS-prMEdelstem_TM-JEV (polyprotein: aa92-681) (opt2)
gggagagggcgcuuggcuugcaaggacccugagcugcggcauugaagcacacccaacccaacucgacugaagucagccucacugaaccggaucugagaaucuucucucucugggcuugccagggcucuccgaaccuagcuagcauccucuucaauuccaacuagaaagcuuaccaugcgcggccucuccucccgcaagcgccgcucccacgacguccucaccguccaguuccucauccucggcaugcuccucaugaccggcggcgucacccucguccgcaagaaccgcuggcuccuccucaacgucaccuccgaggaccucggcaagaccuucuccgucggcaccggcaacugcaccaccaacauccucgaggccaaguacuggugccccgacuccauggaguacaacugccccaaccucuccccccgcgaggagcccgacgacaucgacugcuggugcuacggcgucgagaacguccgcgucgccuacggcaagugcgacuccgccggccgcucccgccgcucccgccgcgccaucgaccuccccacccacgagaaccacggccucaagacccgccaggagaaguggaugaccggccgcaugggcgagcgccagcuccagaagaucgagcgcugguucguccgcaaccccuucuucgccgucaccgcccucaccaucgccuaccucgucggcuccaacaugacccagcgcgucgucaucgcccuccucguccucgccgucggccccgccuacuccgcccacugcaucggcaucaccgaccgcgacuucaucgagggcguccacggcggcaccugggucuccgccacccucgagcaggacaagugcgucaccgucauggcccccgacaagcccucccucgacaucucccucgagaccgucgccaucgaccgccccgccgagguccgcaaggucugcuacaacgccguccucacccacgucaagaucaacgacaagugccccuccaccggcgaggcccaccucgccgaggagaacgagggcgacaacgccugcaagcgcaccuacuccgaccgcggcuggggcaacggcugcggccucuucggcaagggcuccaucgucgccugcgccaaguucaccugcgccaaguccaugucccucuucgaggucgaccagaccaagauccaguacgucauccgcgcccagcuccacgucggcgccaagcaggagaacuggaacaccgacaucaagacccucaaguucgacgcccucuccggcucccaggaggucgaguucaucggcuacggcaaggccacccucgagugccagguccagaccgccgucgacuucggcaacuccuacaucgccgagauggagaccgaguccuggaucgucgaccgccagugggcccaggaccucacccuccccuggcaguccggcuccggcggcgucuggcgcgagaugcaccaccucgucgaguucgagcccccccacgccgccaccauccgcguccucgcccucggcaaccaggagggcucccucaagaccgcccucaccggcgccaugcgcgucaccaaggacaccaacgacaacaaccucuacaagcuccacggcggccacgucuccugccgcgucaagcucuccgcccucacccucaagggcaccuccuacaagaucugcaccgacaagauguucuucgucaagaaccccaccgacaccggccacggcaccgucgucaugcaggucaaggucuccaagggcgcccccugccgcauccccgucaucgucgccgacgaccucaccgccgccaucaacaagggcauccucgucaccgucaaccccaucgccuccaccaacgacgacgagguccucaucgaggucaacccccccuucggcgacuccuacaucaucgucggccgcggcgacucccgccucaccuaccaguggcacaaggagggcuccuccaucggcuccacccucggcaaggccuucuccaccacccucaagggcgcccagcgccucgccgcccucggcgacaccgccugggacuucggcuccaucggcggcgucuucaacuccaucggccgcgccguccaccaggucuucggcggcgccuuccgcacccucuucggcggcauguccuggaucacccagggccucaugggcgcccuccuccucuggaugggcgucaacgcccgcgaccgcuccaucgcccucgccuuccucgccaccggcggcguccucgucuuccucgccaccaacguccacgccugaggacuaguacuggcugcaucucccuuuccucuguccuccauccuucucccaggauggugaagggggaccugguacccagugauccccaccccaggauccuaaaucaugacuuaccugcuaauaaaaacucauuggaaaagugagaagaucuaaaaaaaaaaaaaaaaaaaaaaaaaaaaaaaaaaaaaaaaaaaaaaaaaaaaaaaaaaaaaaaaugcaucccccccccccccccccccccccccccccccaaaggcucuuuucagagccaccagaauu

SEQ ID NO: 1946 - RNA, 2502 nt, Artificial Sequence
  mRNA product Design h-5 comprising derived and/or modified sequence from YFV__NC_002031.1__SSjev(V3)-prMEdelstem_TM-JEV (polyprotein: aa122-681) (opt2)
gggagagggcgcuuggcuugcaaggacccugagcugcggcauugaagcacacccaacccaacucgacugaagucagccucacugaaccggaucugagaaucuucucucucugggcuugccagggcucuccgaaccuagcuagcauccucuucaauuccaacuagaaagcuuaccaugaacgagggcuccaucauguggcucgccucccucgccgucgucaucgccugcgccggcgccgucacccucguccgcaagaaccgcuggcuccuccucaacgucaccuccgaggaccucggcaagaccuucuccgucggcaccggcaacugcaccaccaacauccucgaggccaaguacuggugccccgacuccauggaguacaacugccccaaccucuccccccgcgaggagcccgacgacaucgacugcuggugcuacggcgucgagaacguccgcgucgccuacggcaagugcgacuccgccggccgcucccgccgcucccgccgcgccaucgaccuccccacccacgagaaccacggccucaagacccgccaggagaaguggaugaccggccgcaugggcgagcgccagcuccagaagaucgagcgcugguucguccgcaaccccuucuucgccgucaccgcccucaccaucgccuaccucgucggcuccaacaugacccagcgcgucgucaucgcccuccucguccucgccgucggccccgccuacuccgcccacugcaucggcaucaccgaccgcgacuucaucgagggcguccacggcggcaccugggucuccgccacccucgagcaggacaagugcgucaccgucauggcccccgacaagcccucccucgacaucucccucgagaccgucgccaucgaccgccccgccgagguccgcaaggucugcuacaacgccguccucacccacgucaagaucaacgacaagugccccuccaccggcgaggcccaccucgccgaggagaacgagggcgacaacgccugcaagcgcaccuacuccgaccgcggcuggggcaacggcugcggccucuucggcaagggcuccaucgucgccugcgccaaguucaccugcgccaaguccaugucccucuucgaggucgaccagaccaagauccaguacgucauccgcgcccagcuccacgucggcgccaagcaggagaacuggaacaccgacaucaagacccucaaguucgacgcccucuccggcucccaggaggucgaguucaucggcuacggcaaggccacccucgagugccagguccagaccgccgucgacuucggcaacuccuacaucgccgagauggagaccgaguccuggaucgucgaccgccagugggcccaggaccucacccuccccuggcaguccggcuccggcggcgucuggcgcgagaugcaccaccucgucgaguucgagcccccccacgccgccaccauccgcguccucgcccucggcaaccaggagggcucccucaagaccgcccucaccggcgccaugcgcgucaccaaggacaccaacgacaacaaccucuacaagcuccacggcggccacgucuccugccgcgucaagcucuccgcccucacccucaagggcaccuccuacaagaucugcaccgacaagauguucuucgucaagaaccccaccgacaccggccacggcaccgucgucaugcaggucaaggucuccaagggcgcccccugccgcauccccgucaucgucgccgacgaccucaccgccgccaucaacaagggcauccucgucaccgucaaccccaucgccuccaccaacgacgacgagguccucaucgaggucaacccccccuucggcgacuccuacaucaucgucggccgcggcgacucccgccucaccuaccaguggcacaaggagggcuccuccaucggcuccacccucggcaaggccuucuccaccacccucaagggcgcccagcgccucgccgcccucggcgacaccgccugggacuucggcuccaucggcggcgucuucaacuccaucggccgcgccguccaccaggucuucggcggcgccuuccgcacccucuucggcggcauguccuggaucacccagggccucaugggcgcccuccuccucuggaugggcgucaacgcccgcgaccgcuccaucgcccucgccuuccucgccaccggcggcguccucgucuuccucgccaccaacguccacgccugaggacuaguacuggcugcaucucccuuuccucuguccuccauccuucucccaggauggugaagggggaccugguacccagugauccccaccccaggauccuaaaucaugacuuaccugcuaauaaaaacucauuggaaaagugagaagaucuaaaaaaaaaaaaaaaaaaaaaaaaaaaaaaaaaaaaaaaaaaaaaaaaaaaaaaaaaaaaaaaaugcaucccccccccccccccccccccccccccccccaaaggcucuuuucagagccaccagaauu

SEQ ID NO: 1947 - RNA, 2517 nt, Artificial Sequence
  mRNA product Design h-5 comprising derived and/or modified sequence from YFV__NC_002031.1__X-SS-prME (polyprotein: aa92-778) (opt2)
gggagagggcgcuuggcuugcaaggacccugagcugcggcauugaagcacacccaacccaacucgacugaagucagccucacugaaccggaucugagaaucuucucucucugggcuugccagggcucuccgaaccuagcuagcauccucuucaauuccaacuagaaagcuuaccaugcgcggccucuccucccgcaagcgccgcucccacgacguccucaccguccaguuccucauccucggcaugcuccucaugaccggcggcgucacccucguccgcaagaaccgcuggcuccuccucaacgucaccuccgaggaccucggcaagaccuucuccgucggcaccggcaacugcaccaccaacauccucgaggccaaguacuggugccccgacuccauggaguacaacugccccaaccucuccccccgcgaggagcccgacgacaucgacugcuggugcuacggcgucgagaacguccgcgucgccuacggcaagugcgacuccgccggccgcucccgccgcucccgccgcgccaucgaccuccccacccacgagaaccacggccucaagacccgccaggagaaguggaugaccggccgcaugggcgagcgccagcuccagaagaucgagcgcugguucguccgcaaccccuucuucgccgucaccgcccucaccaucgccuaccucgucggcuccaacaugacccagcgcgucgucaucgcccuccucguccucgccgucggccccgccuacuccgcccacugcaucggcaucaccgaccgcgacuucaucgagggcguccacggcggcaccugggucuccgccacccucgagcaggacaagugcgucaccgucauggcccccgacaagcccucccucgacaucucccucgagaccgucgccaucgaccgccccgccgagguccgcaaggucugcuacaacgccguccucacccacgucaagaucaacgacaagugccccuccaccggcgaggcccaccucgccgaggagaacgagggcgacaacgccugcaagcgcaccuacuccgaccgcggcuggggcaacggcugcggccucuucggcaagggcuccaucgucgccugcgccaaguucaccugcgccaaguccaugucccucuucgaggucgaccagaccaagauccaguacgucauccgcgcccagcuccacgucggcgccaagcaggagaacuggaacaccgacaucaagacccucaaguucgacgcccucuccggcucccaggaggucgaguucaucggcuacggcaaggccacccucgagugccagguccagaccgccgucgacuucggcaacuccuacaucgccgagauggagaccgaguccuggaucgucgaccgccagugggcccaggaccucacccuccccuggcaguccggcuccggcggcgucuggcgcgagaugcaccaccucgucgaguucgagcccccccacgccgccaccauccgcguccucgcccucggcaaccaggagggcucccucaagaccgcccucaccggcgccaugcgcgucaccaaggacaccaacgacaacaaccucuacaagcuccacggcggccacgucuccugccgcgucaagcucuccgcccucacccucaagggcaccuccuacaagaucugcaccgacaagauguucuucgucaagaaccccaccgacaccggccacggcaccgucgucaugcaggucaaggucuccaagggcgcccccugccgcauccccgucaucgucgccgacgaccucaccgccgccaucaacaagggcauccucgucaccgucaaccccaucgccuccaccaacgacgacgagguccucaucgaggucaacccccccuucggcgacuccuacaucaucgucggccgcggcgacucccgccucaccuaccaguggcacaaggagggcuccuccaucggcaagcucuucacccagaccaugaagggcgucgagcgccucgccgucaugggcgacaccgccugggacuucuccuccgccggcggcuucuucaccuccgucggcaagggcauccacaccgucuucggcuccgccuuccagggccucuucggcggccucaacuggaucaccaaggucaucaugggcgccguccucaucugggucggcaucaacacccgcaacaugaccauguccauguccaugauccucgucggcgucaucaugauguuccucucccucggcgucggcgccugaggacuaguacuggcugcaucucccuuuccucuguccuccauccuucucccaggauggugaagggggaccugguacccagugauccccaccccaggauccuaaaucaugacuuaccugcuaauaaaaacucauuggaaaagugagaagaucuaaaaaaaaaaaaaaaaaaaaaaaaaaaaaaaaaaaaaaaaaaaaaaaaaaaaaaaaaaaaaaaaugcaucccccccccccccccccccccccccccccccaaaggcucuuuucagagccaccagaauu

SEQ ID NO: 1948 - RNA, 2520 nt, Artificial Sequence
  mRNA product Design h-5 comprising derived and/or modified sequence from YFV__NC_002031.1__SSjev(V3)-prME-XX (polyprotein: aa122-788) (opt2)
gggagagggcgcuuggcuugcaaggacccugagcugcggcauugaagcacacccaacccaacucgacugaagucagccucacugaaccggaucugagaaucuucucucucugggcuugccagggcucuccgaaccuagcuagcauccucuucaauuccaacuagaaagcuuaccaugaacgagggcuccaucauguggcucgccucccucgccgucgucaucgccugcgccggcgccgucacccucguccgcaagaaccgcuggcuccuccucaacgucaccuccgaggaccucggcaagaccuucuccgucggcaccggcaacugcaccaccaacauccucgaggccaaguacuggugccccgacuccauggaguacaacugccccaaccucuccccccgcgaggagcccgacgacaucgacugcuggugcuacggcgucgagaacguccgcgucgccuacggcaagugcgacuccgccggccgcucccgccgcucccgccgcgccaucgaccuccccacccacgagaaccacggccucaagacccgccaggagaaguggaugaccggccgcaugggcgagcgccagcuccagaagaucgagcgcugguucguccgcaaccccuucuucgccgucaccgcccucaccaucgccuaccucgucggcuccaacaugacccagcgcgucgucaucgcccuccucguccucgccgucggccccgccuacuccgcccacugcaucggcaucaccgaccgcgacuucaucgagggcguccacggcggcaccugggucuccgccacccucgagcaggacaagugcgucaccgucauggcccccgacaagcccucccucgacaucucccucgagaccgucgccaucgaccgccccgccgagguccgcaaggucugcuacaacgccguccucacccacgucaagaucaacgacaagugccccuccaccggcgaggcccaccucgccgaggagaacgagggcgacaacgccugcaagcgcaccuacuccgaccgcggcuggggcaacggcugcggccucuucggcaagggcuccaucgucgccugcgccaaguucaccugcgccaaguccaugucccucuucgaggucgaccagaccaagauccaguacgucauccgcgcccagcuccacgucggcgccaagcaggagaacuggaacaccgacaucaagacccucaaguucgacgcccucuccggcucccaggaggucgaguucaucggcuacggcaaggccacccucgagugccagguccagaccgccgucgacuucggcaacuccuacaucgccgagauggagaccgaguccuggaucgucgaccgccagugggcccaggaccucacccuccccuggcaguccggcuccggcggcgucuggcgcgagaugcaccaccucgucgaguucgagcccccccacgccgccaccauccgcguccucgcccucggcaaccaggagggcucccucaagaccgcccucaccggcgccaugcgcgucaccaaggacaccaacgacaacaaccucuacaagcuccacggcggccacgucuccugccgcgucaagcucuccgcccucacccucaagggcaccuccuacaagaucugcaccgacaagauguucuucgucaagaaccccaccgacaccggccacggcaccgucgucaugcaggucaaggucuccaagggcgcccccugccgcauccccgucaucgucgccgacgaccucaccgccgccaucaacaagggcauccucgucaccgucaaccccaucgccuccaccaacgacgacgagguccucaucgaggucaacccccccuucggcgacuccuacaucaucgucggccgcggcgacucccgccucaccuaccaguggcacaaggagggcuccuccaucggcaagcucuucacccagaccaugaagggcgucgagcgccucgccgucaugggcgacaccgccugggacuucuccuccgccggcggcuucuucaccuccgucggcaagggcauccacaccgucuucggcuccgccuuccagggccucuucggcggccucaacuggaucaccaaggucaucaugggcgccguccucaucugggucggcaucaacacccgcaacaugaccauguccauguccaugauccucgucggcgucaucaugauguuccucucccucggcgucggcgccgaccagggcugcgccaucaacuucggcaagugaggacuaguacuggcugcaucucccuuuccucuguccuccauccuucucccaggauggugaagggggaccugguacccagugauccccaccccaggauccuaaaucaugacuuaccugcuaauaaaaacucauuggaaaagugagaagaucuaaaaaaaaaaaaaaaaaaaaaaaaaaaaaaaaaaaaaaaaaaaaaaaaaaaaaaaaaaaaaaaaugcaucccccccccccccccccccccccccccccccaaaggcucuuuucagagccaccagaauu

SEQ ID NO: 1949 - RNA, 2529 nt, Artificial Sequence
  mRNA product Design h-5 comprising derived and/or modified sequence from YFV__NC_002031.1__X-SS-prMEdelstem_TM-JEV (polyprotein: aa92-681) (opt3)
gggagagggcgcuuggcuugcaaggacccugagcugcggcauugaagcacacccaacccaacucgacugaagucagccucacugaaccggaucugagaaucuucucucucugggcuugccagggcucuccgaaccuagcuagcauccucuucaauuccaacuagaaagcuuaccaugagaggccugagcuccaggaagcggcgcucucacgacgugcucaccguccaguuccuuauccuggggauguuguuaaugacaggagguguuacucuggugcguaaaaaccgauggcuacuccugaauguaacgucagaggaucuuggcaagaccuuuaguguggggacaggaaacugcacuaccaauauucuggaagccaaauacuggugucccgacagcauggaguauaacugcccuaauuuguccccaagagaggaaccggaugacauagauuguuggugcuacggcgucgaaaacgugaggguugcuuaugguaagugugacucugcagggcggucgcgcagaucaaggcgggccaucgaucuccccacacaugagaaucacggacugaaaacccgccaagagaaguggaugacuggccgaaugggcgaaagacagcugcagaagauugagaggugguucgugcggaacccuuucuucgcggucacagcucucaccaucgccuacuuaguggggagcaauaugacgcagcguguaguuauugcacugcuuguguuggccgucggaccagcuuauagugcacauugcaucgguauaacugaccgcgauuuuaucgaaggcgugcacgggggaaccuggguguccgccacacuggagcaagacaaaugugucacuguuauggcucccgauaagccuucucuagacauuagccucgagaccguggccaucgauagaccagcggaaguaaggaaagugugcuacaacgcaguccugacacaugugaagauuaaugacaaaugucccuccaccggcgaggcccaccuugcugaagagaacgaaggugacaaugccugcaagcggacguauucagaucgaggguggggaaacggcuguggccuguucgggaagggaaguaucguugcaugcgcuaaauuuacuugcgccaagagcaugucuuuguucgagguggaccagacaaaaauacaguacgucauucgcgcgcagcuccacgugggugccaagcaagagaauuggaacaccgauaucaaaacucugaaguuugacgcauuauccggcucacaggaaguagaguucauuggguacggaaaagcuacacuggaaugucagguucagaccgccguggauuuuggcaacagcuauaucgcugagauggaaacggagaguuggaucgucgacagacaaugggcccaggaucucacccuuccuuggcagucugguuccgggggcguguggagggagaugcaucaccuggucgaauuugagccaccgcaugcagccacaauucggguguuggcucuaggaaaucaagaaggcagccugaagacugcgcucaccggggcaaugcgcguuacaaaggacacuaacgauaauaaccuguacaaacuucacggaggucacgugucgugcagaguaaagcugucugccuugacccucaaaggcacauccuauaagauauguaccgacaaaauguuuuucgucaagaaucccacugauacggggcauggaacagugguuaugcaagugaaggucucaaaaggcgcuccuugcaggaucccagugauuguagccgacgaccugaccgcagccaucaacaaggguauauuagugacuguuaaucccauugcuaguaccaacgaugacgagguccugaucgaagugaauccuccauucggggauagcuacaucauugugggccguggagacucccggcuaacauaucaguggcacaaagagggcucuagcaucggcagcacccuggggaaggccuucuccacaacucucaaaggagcucagagacuugcagcccugggugacacggcgugggauuuuggcucuaucgggggaguguucaacucaauuggcagggcuguccaccaaguuuuugguggggccuuccggaccuuguuuggaggcaugaguuggauaacacagggcuuaaugggggcacugcuacucuggaugggagugaaugcccgcgaccgaagcaucgcucuggcauuccuugccacugguggcguacugguguuuuuggcuaccaacguccaugccugaggacuaguacuggcugcaucucccuuuccucuguccuccauccuucucccaggauggugaagggggaccugguacccagugauccccaccccaggauccuaaaucaugacuuaccugcuaauaaaaacucauuggaaaagugagaagaucuaaaaaaaaaaaaaaaaaaaaaaaaaaaaaaaaaaaaaaaaaaaaaaaaaaaaaaaaaaaaaaaaugcaucccccccccccccccccccccccccccccccaaaggcucuuuucagagccaccagaauu

SEQ ID NO: 1950 - RNA, 2502 nt, Artificial Sequence
  mRNA product Design h-5 comprising derived and/or modified sequence from YFV__NC_002031.1__SSjev(V3)-prMEdelstem_TM-JEV (polyprotein: aa122-681) (opt3)
gggagagggcgcuuggcuugcaaggacccugagcugcggcauugaagcacacccaacccaacucgacugaagucagccucacugaaccggaucugagaaucuucucucucugggcuugccagggcucuccgaaccuagcuagcauccucuucaauuccaacuagaaagcuuaccaugaacgagggcagcaucauguggcuggccucccucgcuguggucauugcaugcgccggggcgguuacucuggugcguaaaaaccgauggcuacuccugaauguaacgucagaggaucuuggcaagaccuuuaguguggggacaggaaacugcacuaccaauauucuggaagccaaauacuggugucccgacagcauggaguauaacugcccuaauuuguccccaagagaggaaccggaugacauagauuguuggugcuacggcgucgaaaacgugaggguugcuuaugguaagugugacucugcagggcggucgcgcagaucaaggcgggccaucgaucuccccacacaugagaaucacggacugaaaacccgccaagagaaguggaugacuggccgaaugggcgaaagacagcugcagaagauugagaggugguucgugcggaacccuuucuucgcggucacagcucucaccaucgccuacuuaguggggagcaauaugacgcagcguguaguuauugcacugcuuguguuggccgucggaccagcuuauagugcacauugcaucgguauaacugaccgcgauuuuaucgaaggcgugcacgggggaaccuggguguccgccacacuggagcaagacaaaugugucacuguuauggcucccgauaagccuucucuagacauuagccucgagaccguggccaucgauagaccagcggaaguaaggaaagugugcuacaacgcaguccugacacaugugaagauuaaugacaaaugucccuccaccggcgaggcccaccuugcugaagagaacgaaggugacaaugccugcaagcggacguauucagaucgaggguggggaaacggcuguggccuguucgggaagggaaguaucguugcaugcgcuaaauuuacuugcgccaagagcaugucuuuguucgagguggaccagacaaaaauacaguacgucauucgcgcgcagcuccacgugggugccaagcaagagaauuggaacaccgauaucaaaacucugaaguuugacgcauuauccggcucacaggaaguagaguucauuggguacggaaaagcuacacuggaaugucagguucagaccgccguggauuuuggcaacagcuauaucgcugagauggaaacggagaguuggaucgucgacagacaaugggcccaggaucucacccuuccuuggcagucugguuccgggggcguguggagggagaugcaucaccuggucgaauuugagccaccgcaugcagccacaauucggguguuggcucuaggaaaucaagaaggcagccugaagacugcgcucaccggggcaaugcgcguuacaaaggacacuaacgauaauaaccuguacaaacuucacggaggucacgugucgugcagaguaaagcugucugccuugacccucaaaggcacauccuauaagauauguaccgacaaaauguuuuucgucaagaaucccacugauacggggcauggaacagugguuaugcaagugaaggucucaaaaggcgcuccuugcaggaucccagugauuguagccgacgaccugaccgcagccaucaacaaggguauauuagugacuguuaaucccauugcuaguaccaacgaugacgagguccugaucgaagugaauccuccauucggggauagcuacaucauugugggccguggagacucccggcuaacauaucaguggcacaaagagggcucuagcaucggcagcacccuggggaaggccuucuccacaacucucaaaggagcucagagacuugcagcccugggugacacggcgugggauuuuggcucuaucgggggaguguucaacucaauuggcagggcuguccaccaaguuuuugguggggccuuccggaccuuguuuggaggcaugaguuggauaacacagggcuuaaugggggcacugcuacucuggaugggagugaaugcccgcgaccgaagcaucgcucuggcauuccuugccacugguggcguacugguguuuuuggcuaccaacguccaugccugaggacuaguacuggcugcaucucccuuuccucuguccuccauccuucucccaggauggugaagggggaccugguacccagugauccccaccccaggauccuaaaucaugacuuaccugcuaauaaaaacucauuggaaaagugagaagaucuaaaaaaaaaaaaaaaaaaaaaaaaaaaaaaaaaaaaaaaaaaaaaaaaaaaaaaaaaaaaaaaaugcaucccccccccccccccccccccccccccccccaaaggcucuuuucagagccaccagaauu

SEQ ID NO: 1951 - RNA, 2517 nt, Artificial Sequence
  mRNA product Design h-5 comprising derived and/or modified sequence from YFV__NC_002031.1__X-SS-prME (polyprotein: aa92-778) (opt3)
gggagagggcgcuuggcuugcaaggacccugagcugcggcauugaagcacacccaacccaacucgacugaagucagccucacugaaccggaucugagaaucuucucucucugggcuugccagggcucuccgaaccuagcuagcauccucuucaauuccaacuagaaagcuuaccaugagaggccugagcuccaggaagcggcgcucucacgacgugcucaccguccaguuccuuauccuggggauguuguuaaugacaggagguguuacucuggugcguaaaaaccgauggcuacuccugaauguaacgucagaggaucuuggcaagaccuuuaguguggggacaggaaacugcacuaccaauauucuggaagccaaauacuggugucccgacagcauggaguauaacugcccuaauuuguccccaagagaggaaccggaugacauagauuguuggugcuacggcgucgaaaacgugaggguugcuuaugguaagugugacucugcagggcggucgcgcagaucaaggcgggccaucgaucuccccacacaugagaaucacggacugaaaacccgccaagagaaguggaugacuggccgaaugggcgaaagacagcugcagaagauugagaggugguucgugcggaacccuuucuucgcggucacagcucucaccaucgccuacuuaguggggagcaauaugacgcagcguguaguuauugcacugcuuguguuggccgucggaccagcuuauagugcacauugcaucgguauaacugaccgcgauuuuaucgaaggcgugcacgggggaaccuggguguccgccacacuggagcaagacaaaugugucacuguuauggcucccgauaagccuucucuagacauuagccucgagaccguggccaucgauagaccagcggaaguaaggaaagugugcuacaacgcaguccugacacaugugaagauuaaugacaaaugucccuccaccggcgaggcccaccuugcugaagagaacgaaggugacaaugccugcaagcggacguauucagaucgaggguggggaaacggcuguggccuguucgggaagggaaguaucguugcaugcgcuaaauuuacuugcgccaagagcaugucuuuguucgagguggaccagacaaaaauacaguacgucauucgcgcgcagcuccacgugggugccaagcaagagaauuggaacaccgauaucaaaacucugaaguuugacgcauuauccggcucacaggaaguagaguucauuggguacggaaaagcuacacuggaaugucagguucagaccgccguggauuuuggcaacagcuauaucgcugagauggaaacggagaguuggaucgucgacagacaaugggcccaggaucucacccuuccuuggcagucugguuccgggggcguguggagggagaugcaucaccuggucgaauuugagccaccgcaugcagccacaauucggguguuggcucuaggaaaucaagaaggcagccugaagacugcgcucaccggggcaaugcgcguuacaaaggacacuaacgauaauaaccuguacaaacuucacggaggucacgugucgugcagaguaaagcugucugccuugacccucaaaggcacauccuauaagauauguaccgacaaaauguuuuucgucaagaaucccacugauacggggcauggaacagugguuaugcaagugaaggucucaaaaggcgcuccuugcaggaucccagugauuguagccgacgaccugaccgcagccaucaacaaggguauauuagugacuguuaaucccauugcuaguaccaacgaugacgagguccugaucgaagugaauccuccauucggggauagcuacaucauugugggccguggagacucccggcuaacauaucaguggcacaaagagggcucuagcaucgggaagcucuuuacccagacuaugaaaggagucgagcgacuggccguuaugggugauacagcaugggacuucucaagugcgggcggguuuuucacguccgugggaaagggcauucauaccguguuugguagcgcuuuccaggggcuuuuuggcggauugaacuggauaacuaagguaaucaugggcgccguccugauuuggguggggaucaauacaagaaacaugaccaugucuaugucaaugauccucguuggagugauuaugauguuccugagucuuggcgucggugcaugaggacuaguacuggcugcaucucccuuuccucuguccuccauccuucucccaggauggugaagggggaccugguacccagugauccccaccccaggauccuaaaucaugacuuaccugcuaauaaaaacucauuggaaaagugagaagaucuaaaaaaaaaaaaaaaaaaaaaaaaaaaaaaaaaaaaaaaaaaaaaaaaaaaaaaaaaaaaaaaaugcaucccccccccccccccccccccccccccccccaaaggcucuuuucagagccaccagaauu

SEQ ID NO: 1952 - RNA, 2520 nt, Artificial Sequence
  mRNA product Design h-5 comprising derived and/or modified sequence from YFV__NC_002031.1__SSjev(V3)-prME-XX (polyprotein: aa122-788) (opt3)
gggagagggcgcuuggcuugcaaggacccugagcugcggcauugaagcacacccaacccaacucgacugaagucagccucacugaaccggaucugagaaucuucucucucugggcuugccagggcucuccgaaccuagcuagcauccucuucaauuccaacuagaaagcuuaccaugaacgagggcagcaucauguggcuggccucccucgcuguggucauugcaugcgccggggcgguuacucuggugcguaaaaaccgauggcuacuccugaauguaacgucagaggaucuuggcaagaccuuuaguguggggacaggaaacugcacuaccaauauucuggaagccaaauacuggugucccgacagcauggaguauaacugcccuaauuuguccccaagagaggaaccggaugacauagauuguuggugcuacggcgucgaaaacgugaggguugcuuaugguaagugugacucugcagggcggucgcgcagaucaaggcgggccaucgaucuccccacacaugagaaucacggacugaaaacccgccaagagaaguggaugacuggccgaaugggcgaaagacagcugcagaagauugagaggugguucgugcggaacccuuucuucgcggucacagcucucaccaucgccuacuuaguggggagcaauaugacgcagcguguaguuauugcacugcuuguguuggccgucggaccagcuuauagugcacauugcaucgguauaacugaccgcgauuuuaucgaaggcgugcacgggggaaccuggguguccgccacacuggagcaagacaaaugugucacuguuauggcucccgauaagccuucucuagacauuagccucgagaccguggccaucgauagaccagcggaaguaaggaaagugugcuacaacgcaguccugacacaugugaagauuaaugacaaaugucccuccaccggcgaggcccaccuugcugaagagaacgaaggugacaaugccugcaagcggacguauucagaucgaggguggggaaacggcuguggccuguucgggaagggaaguaucguugcaugcgcuaaauuuacuugcgccaagagcaugucuuuguucgagguggaccagacaaaaauacaguacgucauucgcgcgcagcuccacgugggugccaagcaagagaauuggaacaccgauaucaaaacucugaaguuugacgcauuauccggcucacaggaaguagaguucauuggguacggaaaagcuacacuggaaugucagguucagaccgccguggauuuuggcaacagcuauaucgcugagauggaaacggagaguuggaucgucgacagacaaugggcccaggaucucacccuuccuuggcagucugguuccgggggcguguggagggagaugcaucaccuggucgaauuugagccaccgcaugcagccacaauucggguguuggcucuaggaaaucaagaaggcagccugaagacugcgcucaccggggcaaugcgcguuacaaaggacacuaacgauaauaaccuguacaaacuucacggaggucacgugucgugcagaguaaagcugucugccuugacccucaaaggcacauccuauaagauauguaccgacaaaauguuuuucgucaagaaucccacugauacggggcauggaacagugguuaugcaagugaaggucucaaaaggcgcuccuugcaggaucccagugauuguagccgacgaccugaccgcagccaucaacaaggguauauuagugacuguuaaucccauugcuaguaccaacgaugacgagguccugaucgaagugaauccuccauucggggauagcuacaucauugugggccguggagacucccggcuaacauaucaguggcacaaagagggcucuagcaucgggaagcucuuuacccagacuaugaaaggagucgagcgacuggccguuaugggugauacagcaugggacuucucaagugcgggcggguuuuucacguccgugggaaagggcauucauaccguguuugguagcgcuuuccaggggcuuuuuggcggauugaacuggauaacuaagguaaucaugggcgccguccugauuuggguggggaucaauacaagaaacaugaccaugucuaugucaaugauccucguuggagugauuaugauguuccugagucuuggcgucggugcagaucaggggugugccauaaauuuuggaaaaugaggacuaguacuggcugcaucucccuuuccucuguccuccauccuucucccaggauggugaagggggaccugguacccagugauccccaccccaggauccuaaaucaugacuuaccugcuaauaaaaacucauuggaaaagugagaagaucuaaaaaaaaaaaaaaaaaaaaaaaaaaaaaaaaaaaaaaaaaaaaaaaaaaaaaaaaaaaaaaaaugcaucccccccccccccccccccccccccccccccaaaggcucuuuucagagccaccagaauu

SEQ ID NO: 1953 - RNA, 2529 nt, Artificial Sequence
  mRNA product Design h-5 comprising derived and/or modified sequence from YFV__NC_002031.1__X-SS-prMEdelstem_TM-JEV (polyprotein: aa92-681) (opt4)
gggagagggcgcuuggcuugcaaggacccugagcugcggcauugaagcacacccaacccaacucgacugaagucagccucacugaaccggaucugagaaucuucucucucugggcuugccagggcucuccgaaccuagcuagcauccucuucaauuccaacuagaaagcuuaccaugagaggccugagcagcagaaagagaagaagccacgacgugcugaccgugcaguuccugauccugggcaugcugcugaugaccggcggcgugacccuggugagaaagaacagauggcugcugcugaacgugaccagcgaggaccugggcaagaccuucagcgugggcaccggcaacugcaccaccaacauccuggaggccaaguacuggugccccgacagcauggaguacaacugccccaaccugagccccagagaggagcccgacgacaucgacugcuggugcuacggcguggagaacgugagaguggccuacggcaagugcgacagcgccggcagaagcagaagaagcagaagagccaucgaccugcccacccacgagaaccacggccugaagaccagacaggagaaguggaugaccggcagaaugggcgagagacagcugcagaagaucgagagaugguucgugagaaaccccuucuucgccgugaccgcccugaccaucgccuaccuggugggcagcaacaugacccagagaguggugaucgcccugcuggugcuggccgugggccccgccuacagcgcccacugcaucggcaucaccgacagagacuucaucgagggcgugcacggcggcaccugggugagcgccacccuggagcaggacaagugcgugaccgugauggcccccgacaagcccagccuggacaucagccuggagaccguggccaucgacagacccgccgaggugagaaaggugugcuacaacgccgugcugacccacgugaagaucaacgacaagugccccagcaccggcgaggcccaccuggccgaggagaacgagggcgacaacgccugcaagagaaccuacagcgacagaggcuggggcaacggcugcggccuguucggcaagggcagcaucguggccugcgccaaguucaccugcgccaagagcaugagccuguucgagguggaccagaccaagauccaguacgugaucagagcccagcugcacgugggcgccaagcaggagaacuggaacaccgacaucaagacccugaaguucgacgcccugagcggcagccaggagguggaguucaucggcuacggcaaggccacccuggagugccaggugcagaccgccguggacuucggcaacagcuacaucgccgagauggagaccgagagcuggaucguggacagacagugggcccaggaccugacccugcccuggcagagcggcagcggcggcguguggagagagaugcaccaccugguggaguucgagcccccccacgccgccaccaucagagugcuggcccugggcaaccaggagggcagccugaagaccgcccugaccggcgccaugagagugaccaaggacaccaacgacaacaaccuguacaagcugcacggcggccacgugagcugcagagugaagcugagcgcccugacccugaagggcaccagcuacaagaucugcaccgacaagauguucuucgugaagaaccccaccgacaccggccacggcaccguggugaugcaggugaaggugagcaagggcgcccccugcagaauccccgugaucguggccgacgaccugaccgccgccaucaacaagggcauccuggugaccgugaaccccaucgccagcaccaacgacgacgaggugcugaucgaggugaacccccccuucggcgacagcuacaucaucgugggcagaggcgacagcagacugaccuaccaguggcacaaggagggcagcagcaucggcagcacccugggcaaggccuucagcaccacccugaagggcgcccagagacuggccgcccugggcgacaccgccugggacuucggcagcaucggcggcguguucaacagcaucggcagagccgugcaccagguguucggcggcgccuucagaacccuguucggcggcaugagcuggaucacccagggccugaugggcgcccugcugcuguggaugggcgugaacgccagagacagaagcaucgcccuggccuuccuggccaccggcggcgugcugguguuccuggccaccaacgugcacgccugaggacuaguacuggcugcaucucccuuuccucuguccuccauccuucucccaggauggugaagggggaccugguacccagugauccccaccccaggauccuaaaucaugacuuaccugcuaauaaaaacucauuggaaaagugagaagaucuaaaaaaaaaaaaaaaaaaaaaaaaaaaaaaaaaaaaaaaaaaaaaaaaaaaaaaaaaaaaaaaaugcaucccccccccccccccccccccccccccccccaaaggcucuuuucagagccaccagaauu

SEQ ID NO: 1954 - RNA, 2502 nt, Artificial Sequence
  mRNA product Design h-5 comprising derived and/or modified sequence from YFV__NC_002031.1__SSjev(V3)-prMEdelstem_TM-JEV (polyprotein: aa122-681) (opt4)
gggagagggcgcuuggcuugcaaggacccugagcugcggcauugaagcacacccaacccaacucgacugaagucagccucacugaaccggaucugagaaucuucucucucugggcuugccagggcucuccgaaccuagcuagcauccucuucaauuccaacuagaaagcuuaccaugaacgagggcagcaucauguggcuggccagccuggccguggugaucgccugcgccggcgccgugacccuggugagaaagaacagauggcugcugcugaacgugaccagcgaggaccugggcaagaccuucagcgugggcaccggcaacugcaccaccaacauccuggaggccaaguacuggugccccgacagcauggaguacaacugccccaaccugagccccagagaggagcccgacgacaucgacugcuggugcuacggcguggagaacgugagaguggccuacggcaagugcgacagcgccggcagaagcagaagaagcagaagagccaucgaccugcccacccacgagaaccacggccugaagaccagacaggagaaguggaugaccggcagaaugggcgagagacagcugcagaagaucgagagaugguucgugagaaaccccuucuucgccgugaccgcccugaccaucgccuaccuggugggcagcaacaugacccagagaguggugaucgcccugcuggugcuggccgugggccccgccuacagcgcccacugcaucggcaucaccgacagagacuucaucgagggcgugcacggcggcaccugggugagcgccacccuggagcaggacaagugcgugaccgugauggcccccgacaagcccagccuggacaucagccuggagaccguggccaucgacagacccgccgaggugagaaaggugugcuacaacgccgugcugacccacgugaagaucaacgacaagugccccagcaccggcgaggcccaccuggccgaggagaacgagggcgacaacgccugcaagagaaccuacagcgacagaggcuggggcaacggcugcggccuguucggcaagggcagcaucguggccugcgccaaguucaccugcgccaagagcaugagccuguucgagguggaccagaccaagauccaguacgugaucagagcccagcugcacgugggcgccaagcaggagaacuggaacaccgacaucaagacccugaaguucgacgcccugagcggcagccaggagguggaguucaucggcuacggcaaggccacccuggagugccaggugcagaccgccguggacuucggcaacagcuacaucgccgagauggagaccgagagcuggaucguggacagacagugggcccaggaccugacccugcccuggcagagcggcagcggcggcguguggagagagaugcaccaccugguggaguucgagcccccccacgccgccaccaucagagugcuggcccugggcaaccaggagggcagccugaagaccgcccugaccggcgccaugagagugaccaaggacaccaacgacaacaaccuguacaagcugcacggcggccacgugagcugcagagugaagcugagcgcccugacccugaagggcaccagcuacaagaucugcaccgacaagauguucuucgugaagaaccccaccgacaccggccacggcaccguggugaugcaggugaaggugagcaagggcgcccccugcagaauccccgugaucguggccgacgaccugaccgccgccaucaacaagggcauccuggugaccgugaaccccaucgccagcaccaacgacgacgaggugcugaucgaggugaacccccccuucggcgacagcuacaucaucgugggcagaggcgacagcagacugaccuaccaguggcacaaggagggcagcagcaucggcagcacccugggcaaggccuucagcaccacccugaagggcgcccagagacuggccgcccugggcgacaccgccugggacuucggcagcaucggcggcguguucaacagcaucggcagagccgugcaccagguguucggcggcgccuucagaacccuguucggcggcaugagcuggaucacccagggccugaugggcgcccugcugcuguggaugggcgugaacgccagagacagaagcaucgcccuggccuuccuggccaccggcggcgugcugguguuccuggccaccaacgugcacgccugaggacuaguacuggcugcaucucccuuuccucuguccuccauccuucucccaggauggugaagggggaccugguacccagugauccccaccccaggauccuaaaucaugacuuaccugcuaauaaaaacucauuggaaaagugagaagaucuaaaaaaaaaaaaaaaaaaaaaaaaaaaaaaaaaaaaaaaaaaaaaaaaaaaaaaaaaaaaaaaaugcaucccccccccccccccccccccccccccccccaaaggcucuuuucagagccaccagaauu

SEQ ID NO: 1955 - RNA, 2517 nt, Artificial Sequence
  mRNA product Design h-5 comprising derived and/or modified sequence from YFV__NC_002031.1__X-SS-prME (polyprotein: aa92-778) (opt4)
gggagagggcgcuuggcuugcaaggacccugagcugcggcauugaagcacacccaacccaacucgacugaagucagccucacugaaccggaucugagaaucuucucucucugggcuugccagggcucuccgaaccuagcuagcauccucuucaauuccaacuagaaagcuuaccaugagaggccugagcagcagaaagagaagaagccacgacgugcugaccgugcaguuccugauccugggcaugcugcugaugaccggcggcgugacccuggugagaaagaacagauggcugcugcugaacgugaccagcgaggaccugggcaagaccuucagcgugggcaccggcaacugcaccaccaacauccuggaggccaaguacuggugccccgacagcauggaguacaacugccccaaccugagccccagagaggagcccgacgacaucgacugcuggugcuacggcguggagaacgugagaguggccuacggcaagugcgacagcgccggcagaagcagaagaagcagaagagccaucgaccugcccacccacgagaaccacggccugaagaccagacaggagaaguggaugaccggcagaaugggcgagagacagcugcagaagaucgagagaugguucgugagaaaccccuucuucgccgugaccgcccugaccaucgccuaccuggugggcagcaacaugacccagagaguggugaucgcccugcuggugcuggccgugggccccgccuacagcgcccacugcaucggcaucaccgacagagacuucaucgagggcgugcacggcggcaccugggugagcgccacccuggagcaggacaagugcgugaccgugauggcccccgacaagcccagccuggacaucagccuggagaccguggccaucgacagacccgccgaggugagaaaggugugcuacaacgccgugcugacccacgugaagaucaacgacaagugccccagcaccggcgaggcccaccuggccgaggagaacgagggcgacaacgccugcaagagaaccuacagcgacagaggcuggggcaacggcugcggccuguucggcaagggcagcaucguggccugcgccaaguucaccugcgccaagagcaugagccuguucgagguggaccagaccaagauccaguacgugaucagagcccagcugcacgugggcgccaagcaggagaacuggaacaccgacaucaagacccugaaguucgacgcccugagcggcagccaggagguggaguucaucggcuacggcaaggccacccuggagugccaggugcagaccgccguggacuucggcaacagcuacaucgccgagauggagaccgagagcuggaucguggacagacagugggcccaggaccugacccugcccuggcagagcggcagcggcggcguguggagagagaugcaccaccugguggaguucgagcccccccacgccgccaccaucagagugcuggcccugggcaaccaggagggcagccugaagaccgcccugaccggcgccaugagagugaccaaggacaccaacgacaacaaccuguacaagcugcacggcggccacgugagcugcagagugaagcugagcgcccugacccugaagggcaccagcuacaagaucugcaccgacaagauguucuucgugaagaaccccaccgacaccggccacggcaccguggugaugcaggugaaggugagcaagggcgcccccugcagaauccccgugaucguggccgacgaccugaccgccgccaucaacaagggcauccuggugaccgugaaccccaucgccagcaccaacgacgacgaggugcugaucgaggugaacccccccuucggcgacagcuacaucaucgugggcagaggcgacagcagacugaccuaccaguggcacaaggagggcagcagcaucggcaagcuguucacccagaccaugaagggcguggagagacuggccgugaugggcgacaccgccugggacuucagcagcgccggcggcuucuucaccagcgugggcaagggcauccacaccguguucggcagcgccuuccagggccuguucggcggccugaacuggaucaccaaggugaucaugggcgccgugcugaucugggugggcaucaacaccagaaacaugaccaugagcaugagcaugauccuggugggcgugaucaugauguuccugagccugggcgugggcgccugaggacuaguacuggcugcaucucccuuuccucuguccuccauccuucucccaggauggugaagggggaccugguacccagugauccccaccccaggauccuaaaucaugacuuaccugcuaauaaaaacucauuggaaaagugagaagaucuaaaaaaaaaaaaaaaaaaaaaaaaaaaaaaaaaaaaaaaaaaaaaaaaaaaaaaaaaaaaaaaaugcaucccccccccccccccccccccccccccccccaaaggcucuuuucagagccaccagaauu

SEQ ID NO: 1956 - RNA, 2520 nt, Artificial Sequence
  mRNA product Design h-5 comprising derived and/or modified sequence from YFV__NC_002031.1__SSjev(V3)-prME-XX (polyprotein: aa122-788) (opt4)
gggagagggcgcuuggcuugcaaggacccugagcugcggcauugaagcacacccaacccaacucgacugaagucagccucacugaaccggaucugagaaucuucucucucugggcuugccagggcucuccgaaccuagcuagcauccucuucaauuccaacuagaaagcuuaccaugaacgagggcagcaucauguggcuggccagccuggccguggugaucgccugcgccggcgccgugacccuggugagaaagaacagauggcugcugcugaacgugaccagcgaggaccugggcaagaccuucagcgugggcaccggcaacugcaccaccaacauccuggaggccaaguacuggugccccgacagcauggaguacaacugccccaaccugagccccagagaggagcccgacgacaucgacugcuggugcuacggcguggagaacgugagaguggccuacggcaagugcgacagcgccggcagaagcagaagaagcagaagagccaucgaccugcccacccacgagaaccacggccugaagaccagacaggagaaguggaugaccggcagaaugggcgagagacagcugcagaagaucgagagaugguucgugagaaaccccuucuucgccgugaccgcccugaccaucgccuaccuggugggcagcaacaugacccagagaguggugaucgcccugcuggugcuggccgugggccccgccuacagcgcccacugcaucggcaucaccgacagagacuucaucgagggcgugcacggcggcaccugggugagcgccacccuggagcaggacaagugcgugaccgugauggcccccgacaagcccagccuggacaucagccuggagaccguggccaucgacagacccgccgaggugagaaaggugugcuacaacgccgugcugacccacgugaagaucaacgacaagugccccagcaccggcgaggcccaccuggccgaggagaacgagggcgacaacgccugcaagagaaccuacagcgacagaggcuggggcaacggcugcggccuguucggcaagggcagcaucguggccugcgccaaguucaccugcgccaagagcaugagccuguucgagguggaccagaccaagauccaguacgugaucagagcccagcugcacgugggcgccaagcaggagaacuggaacaccgacaucaagacccugaaguucgacgcccugagcggcagccaggagguggaguucaucggcuacggcaaggccacccuggagugccaggugcagaccgccguggacuucggcaacagcuacaucgccgagauggagaccgagagcuggaucguggacagacagugggcccaggaccugacccugcccuggcagagcggcagcggcggcguguggagagagaugcaccaccugguggaguucgagcccccccacgccgccaccaucagagugcuggcccugggcaaccaggagggcagccugaagaccgcccugaccggcgccaugagagugaccaaggacaccaacgacaacaaccuguacaagcugcacggcggccacgugagcugcagagugaagcugagcgcccugacccugaagggcaccagcuacaagaucugcaccgacaagauguucuucgugaagaaccccaccgacaccggccacggcaccguggugaugcaggugaaggugagcaagggcgcccccugcagaauccccgugaucguggccgacgaccugaccgccgccaucaacaagggcauccuggugaccgugaaccccaucgccagcaccaacgacgacgaggugcugaucgaggugaacccccccuucggcgacagcuacaucaucgugggcagaggcgacagcagacugaccuaccaguggcacaaggagggcagcagcaucggcaagcuguucacccagaccaugaagggcguggagagacuggccgugaugggcgacaccgccugggacuucagcagcgccggcggcuucuucaccagcgugggcaagggcauccacaccguguucggcagcgccuuccagggccuguucggcggccugaacuggaucaccaaggugaucaugggcgccgugcugaucugggugggcaucaacaccagaaacaugaccaugagcaugagcaugauccuggugggcgugaucaugauguuccugagccugggcgugggcgccgaccagggcugcgccaucaacuucggcaagugaggacuaguacuggcugcaucucccuuuccucuguccuccauccuucucccaggauggugaagggggaccugguacccagugauccccaccccaggauccuaaaucaugacuuaccugcuaauaaaaacucauuggaaaagugagaagaucuaaaaaaaaaaaaaaaaaaaaaaaaaaaaaaaaaaaaaaaaaaaaaaaaaaaaaaaaaaaaaaaaugcaucccccccccccccccccccccccccccccccaaaggcucuuuucagagccaccagaauu

SEQ ID NO: 1957 - RNA, 2529 nt, Artificial Sequence
  mRNA product Design h-5 comprising derived and/or modified sequence from YFV__NC_002031.1__X-SS-prMEdelstem_TM-JEV (polyprotein: aa92-681) (opt5)
gggagagggcgcuuggcuugcaaggacccugagcugcggcauugaagcacacccaacccaacucgacugaagucagccucacugaaccggaucugagaaucuucucucucugggcuugccagggcucuccgaaccuagcuagcauccucuucaauuccaacuagaaagcuuaccaugagaggccugagcucccggaagcgcagaucucacgacgugcucaccguccaguuccugauccuugggaugcugcucaugacaggaggcguuacgcuggugcggaaaaaccgcuggcuucugcucaaugugaccagcgaggaucuggggaagacauuuuccgucggaaccggcaacugcacaaccaauauucuggaagccaaauacuggugucccgacucuauggaguauaacugcccuaaucucagcccgagagaagaacccgaugacaucgauuguuggugcuacgggguggaaaacguucggguggcuuauggaaagugugacuccgccggccgcucuagacggagccgcagagcgauugaucugccuacacaugagaaucacggccuuaaaacccggcaagagaaguggaugacggggcgcaugggagaaagacagcugcagaagaucgagcggugguucguccgcaaccccuuuuucgcugugaccgcccucacaauugccuaccugguuggcuccaauaugacccagagaguggucaucgcccuucuggugcucgcuguggggccugcuuauagcgcccauugcaucggaauuacagaccgggauuuuaucgaaggcguccacgggggaaccuggguuucugcgacgcuggagcaagacaaaugugugacagugauggcccccgauaagccuucccuggacauuagccucgagaccgucgcuaucgauagaccggccgaagugcgcaaaguuugcuacaacgcugugcugacacaugucaagauuaaugacaaaugucccucuaccggcgaggcccaccuugcggaagagaacgaaggcgacaaugccugcaagcggaccuauuccgauagaggguggggaaacggcugugggcuguucggaaagggcagcaucguggcuugcgccaaauuuacaugcgcuaagucuaugucccucuucgagguugaccagacgaaaauucaguacgugauccgcgcccagcugcacgucggggccaagcaagagaauuggaacaccgauaucaaaacacuuaaguuugacgcucugagcggaucccaggaaguggaguucauuggcuacggcaaagcgacccucgaaugucagguccagacagccguggauuuugggaacucuuauaucgcugagauggaaaccgagagcuggauuguugaccggcaaugggcccaggaucugacgcugccuuggcaguccggaagcggcgggguguggagagagaugcaucaccucgucgaguucgagcccccucaugccgcuacaauccgcgugcuggcccuuggaaaucaagaaggcucucugaagaccgcgcucaccggggcuaugcggguuacaaaggacaccaacgauaauaaccuguacaaacuucacggcggacacguguccugcagagucaagcugagcgcccucacacugaaaggcacgucuuauaagauuuguaccgacaaaauguuuuucgugaagaaucccacagauaccgggcauggaacagugguuaugcaggucaaggugagcaaaggcgccccgugccgcaucccugugaucgucgcugacgaccugaccgccgcuauuaacaaggggauccucgugacgguuaaucccauugccuccaccaacgaugacgaggugcugaucgaagucaauccucccuucggagauucuuacauuaucgugggccggggagacagcagacuuacauaucaguggcacaaagagggcuccagcaucggcagcacccuggggaaggccuucuccacaacgcucaaaggagcucagagacuggccgcgcuuggcgacaccgcuugggauuuugggucuaucggaggcguguucaacagcauugggcgggccguccaccaaguuuuuggaggcgccuuccgcacacuguuuggcgggauguccuggaucacccagggacucaugggcgcucugcuucuguggaugggggugaaugccagagaccggucuauugcucucgccuuccuggcgacaggaggcgugcuggucuuucucgccaccaacgugcaugcuugaggacuaguacuggcugcaucucccuuuccucuguccuccauccuucucccaggauggugaagggggaccugguacccagugauccccaccccaggauccuaaaucaugacuuaccugcuaauaaaaacucauuggaaaagugagaagaucuaaaaaaaaaaaaaaaaaaaaaaaaaaaaaaaaaaaaaaaaaaaaaaaaaaaaaaaaaaaaaaaaugcaucccccccccccccccccccccccccccccccaaaggcucuuuucagagccaccagaauu

SEQ ID NO: 1958 - RNA, 2502 nt, Artificial Sequence
  mRNA product Design h-5 comprising derived and/or modified sequence from YFV__NC_002031.1__SSjev(V3)-prMEdelstem_TM-JEV (polyprotein: aa122-681) (opt5)
gggagagggcgcuuggcuugcaaggacccugagcugcggcauugaagcacacccaacccaacucgacugaagucagccucacugaaccggaucugagaaucuucucucucugggcuugccagggcucuccgaaccuagcuagcauccucuucaauuccaacuagaaagcuuaccaugaacgagggcagcaucauguggcuggccucccucgcuguggucauugccugcgcgggggcuguuacgcuggugcggaaaaaccgcuggcuucugcucaaugugaccagcgaggaucuggggaagacauuuuccgucggaaccggcaacugcacaaccaauauucuggaagccaaauacuggugucccgacucuauggaguauaacugcccuaaucucagcccgagagaagaacccgaugacaucgauuguuggugcuacgggguggaaaacguucggguggcuuauggaaagugugacuccgccggccgcucuagacggagccgcagagcgauugaucugccuacacaugagaaucacggccuuaaaacccggcaagagaaguggaugacggggcgcaugggagaaagacagcugcagaagaucgagcggugguucguccgcaaccccuuuuucgcugugaccgcccucacaauugccuaccugguuggcuccaauaugacccagagaguggucaucgcccuucuggugcucgcuguggggccugcuuauagcgcccauugcaucggaauuacagaccgggauuuuaucgaaggcguccacgggggaaccuggguuucugcgacgcuggagcaagacaaaugugugacagugauggcccccgauaagccuucccuggacauuagccucgagaccgucgcuaucgauagaccggccgaagugcgcaaaguuugcuacaacgcugugcugacacaugucaagauuaaugacaaaugucccucuaccggcgaggcccaccuugcggaagagaacgaaggcgacaaugccugcaagcggaccuauuccgauagaggguggggaaacggcugugggcuguucggaaagggcagcaucguggcuugcgccaaauuuacaugcgcuaagucuaugucccucuucgagguugaccagacgaaaauucaguacgugauccgcgcccagcugcacgucggggccaagcaagagaauuggaacaccgauaucaaaacacuuaaguuugacgcucugagcggaucccaggaaguggaguucauuggcuacggcaaagcgacccucgaaugucagguccagacagccguggauuuugggaacucuuauaucgcugagauggaaaccgagagcuggauuguugaccggcaaugggcccaggaucugacgcugccuuggcaguccggaagcggcgggguguggagagagaugcaucaccucgucgaguucgagcccccucaugccgcuacaauccgcgugcuggcccuuggaaaucaagaaggcucucugaagaccgcgcucaccggggcuaugcggguuacaaaggacaccaacgauaauaaccuguacaaacuucacggcggacacguguccugcagagucaagcugagcgcccucacacugaaaggcacgucuuauaagauuuguaccgacaaaauguuuuucgugaagaaucccacagauaccgggcauggaacagugguuaugcaggucaaggugagcaaaggcgccccgugccgcaucccugugaucgucgcugacgaccugaccgccgcuauuaacaaggggauccucgugacgguuaaucccauugccuccaccaacgaugacgaggugcugaucgaagucaauccucccuucggagauucuuacauuaucgugggccggggagacagcagacuuacauaucaguggcacaaagagggcuccagcaucggcagcacccuggggaaggccuucuccacaacgcucaaaggagcucagagacuggccgcgcuuggcgacaccgcuugggauuuugggucuaucggaggcguguucaacagcauugggcgggccguccaccaaguuuuuggaggcgccuuccgcacacuguuuggcgggauguccuggaucacccagggacucaugggcgcucugcuucuguggaugggggugaaugccagagaccggucuauugcucucgccuuccuggcgacaggaggcgugcuggucuuucucgccaccaacgugcaugcuugaggacuaguacuggcugcaucucccuuuccucuguccuccauccuucucccaggauggugaagggggaccugguacccagugauccccaccccaggauccuaaaucaugacuuaccugcuaauaaaaacucauuggaaaagugagaagaucuaaaaaaaaaaaaaaaaaaaaaaaaaaaaaaaaaaaaaaaaaaaaaaaaaaaaaaaaaaaaaaaaugcaucccccccccccccccccccccccccccccccaaaggcucuuuucagagccaccagaauu

SEQ ID NO: 1959 - RNA, 2517 nt, Artificial Sequence
  mRNA product Design h-5 comprising derived and/or modified sequence from YFV__NC_002031.1__X-SS-prME (polyprotein: aa92-778) (opt5)
gggagagggcgcuuggcuugcaaggacccugagcugcggcauugaagcacacccaacccaacucgacugaagucagccucacugaaccggaucugagaaucuucucucucugggcuugccagggcucuccgaaccuagcuagcauccucuucaauuccaacuagaaagcuuaccaugagaggccugagcucccggaagcgcagaucucacgacgugcucaccguccaguuccugauccuugggaugcugcucaugacaggaggcguuacgcuggugcggaaaaaccgcuggcuucugcucaaugugaccagcgaggaucuggggaagacauuuuccgucggaaccggcaacugcacaaccaauauucuggaagccaaauacuggugucccgacucuauggaguauaacugcccuaaucucagcccgagagaagaacccgaugacaucgauuguuggugcuacgggguggaaaacguucggguggcuuauggaaagugugacuccgccggccgcucuagacggagccgcagagcgauugaucugccuacacaugagaaucacggccuuaaaacccggcaagagaaguggaugacggggcgcaugggagaaagacagcugcagaagaucgagcggugguucguccgcaaccccuuuuucgcugugaccgcccucacaauugccuaccugguuggcuccaauaugacccagagaguggucaucgcccuucuggugcucgcuguggggccugcuuauagcgcccauugcaucggaauuacagaccgggauuuuaucgaaggcguccacgggggaaccuggguuucugcgacgcuggagcaagacaaaugugugacagugauggcccccgauaagccuucccuggacauuagccucgagaccgucgcuaucgauagaccggccgaagugcgcaaaguuugcuacaacgcugugcugacacaugucaagauuaaugacaaaugucccucuaccggcgaggcccaccuugcggaagagaacgaaggcgacaaugccugcaagcggaccuauuccgauagaggguggggaaacggcugugggcuguucggaaagggcagcaucguggcuugcgccaaauuuacaugcgcuaagucuaugucccucuucgagguugaccagacgaaaauucaguacgugauccgcgcccagcugcacgucggggccaagcaagagaauuggaacaccgauaucaaaacacuuaaguuugacgcucugagcggaucccaggaaguggaguucauuggcuacggcaaagcgacccucgaaugucagguccagacagccguggauuuugggaacucuuauaucgcugagauggaaaccgagagcuggauuguugaccggcaaugggcccaggaucugacgcugccuuggcaguccggaagcggcgggguguggagagagaugcaucaccucgucgaguucgagcccccucaugccgcuacaauccgcgugcuggcccuuggaaaucaagaaggcucucugaagaccgcgcucaccggggcuaugcggguuacaaaggacaccaacgauaauaaccuguacaaacuucacggcggacacguguccugcagagucaagcugagcgcccucacacugaaaggcacgucuuauaagauuuguaccgacaaaauguuuuucgugaagaaucccacagauaccgggcauggaacagugguuaugcaggucaaggugagcaaaggcgccccgugccgcaucccugugaucgucgcugacgaccugaccgccgcuauuaacaaggggauccucgugacgguuaaucccauugccuccaccaacgaugacgaggugcugaucgaagucaauccucccuucggagauucuuacauuaucgugggccggggagacagcagacuuacauaucaguggcacaaagagggcuccagcaucggaaagcuguuuacccagacaaugaaaggcguugagcgccucgcggugaugggggauaccgccugggacuucucuuccgcuggaggcuuuuucacgagcgucgggaaggggauucauacaguguuuggcucugccuuccaagggcuguuuggcggacugaacuggaucaccaagguuauuaugggcgcugugcuuaucugggucgggauuaauacacggaacaugaccauguccaugagcaugauccucgugggagugauuaugauguuccugucccugggcgucggggccugaggacuaguacuggcugcaucucccuuuccucuguccuccauccuucucccaggauggugaagggggaccugguacccagugauccccaccccaggauccuaaaucaugacuuaccugcuaauaaaaacucauuggaaaagugagaagaucuaaaaaaaaaaaaaaaaaaaaaaaaaaaaaaaaaaaaaaaaaaaaaaaaaaaaaaaaaaaaaaaaugcaucccccccccccccccccccccccccccccccaaaggcucuuuucagagccaccagaauu

SEQ ID NO: 1960 - RNA, 2520 nt, Artificial Sequence
  mRNA product Design h-5 comprising derived and/or modified sequence from YFV__NC_002031.1__SSjev(V3)-prME-XX (polyprotein: aa122-788) (opt5)
gggagagggcgcuuggcuugcaaggacccugagcugcggcauugaagcacacccaacccaacucgacugaagucagccucacugaaccggaucugagaaucuucucucucugggcuugccagggcucuccgaaccuagcuagcauccucuucaauuccaacuagaaagcuuaccaugaacgagggcagcaucauguggcuggccucccucgcuguggucauugccugcgcgggggcuguuacgcuggugcggaaaaaccgcuggcuucugcucaaugugaccagcgaggaucuggggaagacauuuuccgucggaaccggcaacugcacaaccaauauucuggaagccaaauacuggugucccgacucuauggaguauaacugcccuaaucucagcccgagagaagaacccgaugacaucgauuguuggugcuacgggguggaaaacguucggguggcuuauggaaagugugacuccgccggccgcucuagacggagccgcagagcgauugaucugccuacacaugagaaucacggccuuaaaacccggcaagagaaguggaugacggggcgcaugggagaaagacagcugcagaagaucgagcggugguucguccgcaaccccuuuuucgcugugaccgcccucacaauugccuaccugguuggcuccaauaugacccagagaguggucaucgcccuucuggugcucgcuguggggccugcuuauagcgcccauugcaucggaauuacagaccgggauuuuaucgaaggcguccacgggggaaccuggguuucugcgacgcuggagcaagacaaaugugugacagugauggcccccgauaagccuucccuggacauuagccucgagaccgucgcuaucgauagaccggccgaagugcgcaaaguuugcuacaacgcugugcugacacaugucaagauuaaugacaaaugucccucuaccggcgaggcccaccuugcggaagagaacgaaggcgacaaugccugcaagcggaccuauuccgauagaggguggggaaacggcugugggcuguucggaaagggcagcaucguggcuugcgccaaauuuacaugcgcuaagucuaugucccucuucgagguugaccagacgaaaauucaguacgugauccgcgcccagcugcacgucggggccaagcaagagaauuggaacaccgauaucaaaacacuuaaguuugacgcucugagcggaucccaggaaguggaguucauuggcuacggcaaagcgacccucgaaugucagguccagacagccguggauuuugggaacucuuauaucgcugagauggaaaccgagagcuggauuguugaccggcaaugggcccaggaucugacgcugccuuggcaguccggaagcggcgggguguggagagagaugcaucaccucgucgaguucgagcccccucaugccgcuacaauccgcgugcuggcccuuggaaaucaagaaggcucucugaagaccgcgcucaccggggcuaugcggguuacaaaggacaccaacgauaauaaccuguacaaacuucacggcggacacguguccugcagagucaagcugagcgcccucacacugaaaggcacgucuuauaagauuuguaccgacaaaauguuuuucgugaagaaucccacagauaccgggcauggaacagugguuaugcaggucaaggugagcaaaggcgccccgugccgcaucccugugaucgucgcugacgaccugaccgccgcuauuaacaaggggauccucgugacgguuaaucccauugccuccaccaacgaugacgaggugcugaucgaagucaauccucccuucggagauucuuacauuaucgugggccggggagacagcagacuuacauaucaguggcacaaagagggcuccagcaucggaaagcuguuuacccagacaaugaaaggcguugagcgccucgcggugaugggggauaccgccugggacuucucuuccgcuggaggcuuuuucacgagcgucgggaaggggauucauacaguguuuggcucugccuuccaagggcuguuuggcggacugaacuggaucaccaagguuauuaugggcgcugugcuuaucugggucgggauuaauacacggaacaugaccauguccaugagcaugauccucgugggagugauuaugauguuccugucccugggcgucggggccgaucagggaugugcgaucaauuuuggcaaaugaggacuaguacuggcugcaucucccuuuccucuguccuccauccuucucccaggauggugaagggggaccugguacccagugauccccaccccaggauccuaaaucaugacuuaccugcuaauaaaaacucauuggaaaagugagaagaucuaaaaaaaaaaaaaaaaaaaaaaaaaaaaaaaaaaaaaaaaaaaaaaaaaaaaaaaaaaaaaaaaugcaucccccccccccccccccccccccccccccccaaaggcucuuuucagagccaccagaauu

SEQ ID NO: 1961 - RNA, 2529 nt, Artificial Sequence
  mRNA product Design h-5 comprising derived and/or modified sequence from YFV__NC_002031.1__X-SS-prMEdelstem_TM-JEV (polyprotein: aa92-681) (opt6)
gggagagggcgcuuggcuugcaaggacccugagcugcggcauugaagcacacccaacccaacucgacugaagucagccucacugaaccggaucugagaaucuucucucucugggcuugccagggcucuccgaaccuagcuagcauccucuucaauuccaacuagaaagcuuaccaugagaggauuaucaaguagaaaaagaagaucacaugauguacuaaccgugcaauuuuugaucuuagggaugcucuuaaugacaggagguguuacauuaguaagaaagaaucgauggcugcuuuuaaaugugacaucagaggauuuagggaaaacauuuucgguaggaacaggaaauuguacuacaaauauacuugaagcaaaauauuggugcccagacucuauggaauauaauuguccaaauuuaaguccuagagaagaaccugacgauauagauuguugguguuaugguguagaaaauguaagaguagcauacggcaaaugcgauagugcaggacguucuagacguucaaggagagccauagaucugcccacucacgaaaaucacggauugaaaacacgacaagaaaaauggaugacugggcgaaugggagaaagacaacuacagaaaauugaaagaugguucguuagaaauccauucuuugccguaacagcuuuaacaauagccuauuuaguagguaguaauaugacacaaagaguaguaauagcauugcuaguguuagcaguuggaccagcuuauagugcacauugcauaggaauaacagauagagacuuuauagaaggaguacacgggggaacuuggguaagugccacuuuagaacaagauaaauguguuacagugauggcgccagauaaaccaagucuggacauaaguuuggaaacaguagcgauugauagacccgcagaaguaagaaaaguuuguuauaaugcuguucuaacccauguuaaaauaaaugauaaaugcccuagcaccggagaagcccaucuagcagaagaaaaugaaggagauaacgcauguaaacgaacauacucagauagaggauggggcaacggauguggcuuguuuggaaaagguagcauaguagcaugcgcuaaauuuacaugcgcaaagucaaugucauuauuugaaguagaucaaacaaaaauacaauauguaauaagagcucaauuacacgugggugcaaaacaagaaaauuggaauacagacauaaagacacuaaaguucgacgcauuaaguggaucacaagagguagaauuuauaggguacggaaaagcgacuuuagagugucaaguccaaacagcaguagauuucgguaacucauacauagcagaaauggaaacugaaaguuggauaguagauagacaaugggcacaagacuugacacuaccuuggcaaucaggaagcggaggaguauggagagaaaugcaucauuuaguagaauuugaaccaccucaugcagcaacaauaagaguauuagcccuaggaaaccaagaaggaaguuuaaaaacagcacuaacaggagcuaugagaguaacaaaagauacaaaugacaacaaucuauacaaauuacacggaggacauguaagcugccggguaaaguugagcgcacuaacauuaaaaggaacgaguuauaaaauaugcacagauaaaauguucuuuguuaaaaauccuacagauaccggucauggaacaguaguaaugcaaguaaaaguaaguaaaggcgcucccuguagaauaccuguaauagucgcagacgauuuaaccgcagcaauaaauaaaggaauauuagucacgguaaacccaauagcgucaacaaaugaugaugaaguauuaauagaaguuaacccaccuuuuggagacaguuauauaauagucggaaggggugauaguagacuaacauaccaauggcauaaagaaggaagcucaauaggaaguacacuaggaaaagcauuuaguacaacauuaaaaggagcacaaagauuagcagcauuaggagauacagcaugggauuuuggaagcauaggaggaguauuuaauaguauagguagagcaguacaucaaguauuuggaggagcauuuagaacauuauuuggaggaaugaguuggauaacacaaggauuaaugggagcauuauuauuauggaugggaguaaaugcaagagauagaaguauagcauuagcauuuuuagcaacaggaggaguauuaguauuuuuagcaacaaauguacaugcaugaggacuaguacuggcugcaucucccuuuccucuguccuccauccuucucccaggauggugaagggggaccugguacccagugauccccaccccaggauccuaaaucaugacuuaccugcuaauaaaaacucauuggaaaagugagaagaucuaaaaaaaaaaaaaaaaaaaaaaaaaaaaaaaaaaaaaaaaaaaaaaaaaaaaaaaaaaaaaaaaugcaucccccccccccccccccccccccccccccccaaaggcucuuuucagagccaccagaauu

SEQ ID NO: 1962 - RNA, 2502 nt, Artificial Sequence
  mRNA product Design h-5 comprising derived and/or modified sequence from YFV__NC_002031.1__SSjev(V3)-prMEdelstem_TM-JEV (polyprotein: aa122-681) (opt6)
gggagagggcgcuuggcuugcaaggacccugagcugcggcauugaagcacacccaacccaacucgacugaagucagccucacugaaccggaucugagaaucuucucucucugggcuugccagggcucuccgaaccuagcuagcauccucuucaauuccaacuagaaagcuuaccaugaaugaagguucaauuaugugguuggcaucauuagcaguuguaauugcaugugcuggugcaguuacauuaguaagaaagaaucgauggcugcuuuuaaaugugacaucagaggauuuagggaaaacauuuucgguaggaacaggaaauuguacuacaaauauacuugaagcaaaauauuggugcccagacucuauggaauauaauuguccaaauuuaaguccuagagaagaaccugacgauauagauuguugguguuaugguguagaaaauguaagaguagcauacggcaaaugcgauagugcaggacguucuagacguucaaggagagccauagaucugcccacucacgaaaaucacggauugaaaacacgacaagaaaaauggaugacugggcgaaugggagaaagacaacuacagaaaauugaaagaugguucguuagaaauccauucuuugccguaacagcuuuaacaauagccuauuuaguagguaguaauaugacacaaagaguaguaauagcauugcuaguguuagcaguuggaccagcuuauagugcacauugcauaggaauaacagauagagacuuuauagaaggaguacacgggggaacuuggguaagugccacuuuagaacaagauaaauguguuacagugauggcgccagauaaaccaagucuggacauaaguuuggaaacaguagcgauugauagacccgcagaaguaagaaaaguuuguuauaaugcuguucuaacccauguuaaaauaaaugauaaaugcccuagcaccggagaagcccaucuagcagaagaaaaugaaggagauaacgcauguaaacgaacauacucagauagaggauggggcaacggauguggcuuguuuggaaaagguagcauaguagcaugcgcuaaauuuacaugcgcaaagucaaugucauuauuugaaguagaucaaacaaaaauacaauauguaauaagagcucaauuacacgugggugcaaaacaagaaaauuggaauacagacauaaagacacuaaaguucgacgcauuaaguggaucacaagagguagaauuuauaggguacggaaaagcgacuuuagagugucaaguccaaacagcaguagauuucgguaacucauacauagcagaaauggaaacugaaaguuggauaguagauagacaaugggcacaagacuugacacuaccuuggcaaucaggaagcggaggaguauggagagaaaugcaucauuuaguagaauuugaaccaccucaugcagcaacaauaagaguauuagcccuaggaaaccaagaaggaaguuuaaaaacagcacuaacaggagcuaugagaguaacaaaagauacaaaugacaacaaucuauacaaauuacacggaggacauguaagcugccggguaaaguugagcgcacuaacauuaaaaggaacgaguuauaaaauaugcacagauaaaauguucuuuguuaaaaauccuacagauaccggucauggaacaguaguaaugcaaguaaaaguaaguaaaggcgcucccuguagaauaccuguaauagucgcagacgauuuaaccgcagcaauaaauaaaggaauauuagucacgguaaacccaauagcgucaacaaaugaugaugaaguauuaauagaaguuaacccaccuuuuggagacaguuauauaauagucggaaggggugauaguagacuaacauaccaauggcauaaagaaggaagcucaauaggaaguacacuaggaaaagcauuuaguacaacauuaaaaggagcacaaagauuagcagcauuaggagauacagcaugggauuuuggaagcauaggaggaguauuuaauaguauagguagagcaguacaucaaguauuuggaggagcauuuagaacauuauuuggaggaaugaguuggauaacacaaggauuaaugggagcauuauuauuauggaugggaguaaaugcaagagauagaaguauagcauuagcauuuuuagcaacaggaggaguauuaguauuuuuagcaacaaauguacaugcaugaggacuaguacuggcugcaucucccuuuccucuguccuccauccuucucccaggauggugaagggggaccugguacccagugauccccaccccaggauccuaaaucaugacuuaccugcuaauaaaaacucauuggaaaagugagaagaucuaaaaaaaaaaaaaaaaaaaaaaaaaaaaaaaaaaaaaaaaaaaaaaaaaaaaaaaaaaaaaaaaugcaucccccccccccccccccccccccccccccccaaaggcucuuuucagagccaccagaauu

SEQ ID NO: 1963 - RNA, 2517 nt, Artificial Sequence
  mRNA product Design h-5 comprising derived and/or modified sequence from YFV__NC_002031.1__X-SS-prME (polyprotein: aa92-778) (opt6)
gggagagggcgcuuggcuugcaaggacccugagcugcggcauugaagcacacccaacccaacucgacugaagucagccucacugaaccggaucugagaaucuucucucucugggcuugccagggcucuccgaaccuagcuagcauccucuucaauuccaacuagaaagcuuaccaugagaggauuaucaaguagaaaaagaagaucacaugauguacuaaccgugcaauuuuugaucuuagggaugcucuuaaugacaggagguguuacauuaguaagaaagaaucgauggcugcuuuuaaaugugacaucagaggauuuagggaaaacauuuucgguaggaacaggaaauuguacuacaaauauacuugaagcaaaauauuggugcccagacucuauggaauauaauuguccaaauuuaaguccuagagaagaaccugacgauauagauuguugguguuaugguguagaaaauguaagaguagcauacggcaaaugcgauagugcaggacguucuagacguucaaggagagccauagaucugcccacucacgaaaaucacggauugaaaacacgacaagaaaaauggaugacugggcgaaugggagaaagacaacuacagaaaauugaaagaugguucguuagaaauccauucuuugccguaacagcuuuaacaauagccuauuuaguagguaguaauaugacacaaagaguaguaauagcauugcuaguguuagcaguuggaccagcuuauagugcacauugcauaggaauaacagauagagacuuuauagaaggaguacacgggggaacuuggguaagugccacuuuagaacaagauaaauguguuacagugauggcgccagauaaaccaagucuggacauaaguuuggaaacaguagcgauugauagacccgcagaaguaagaaaaguuuguuauaaugcuguucuaacccauguuaaaauaaaugauaaaugcccuagcaccggagaagcccaucuagcagaagaaaaugaaggagauaacgcauguaaacgaacauacucagauagaggauggggcaacggauguggcuuguuuggaaaagguagcauaguagcaugcgcuaaauuuacaugcgcaaagucaaugucauuauuugaaguagaucaaacaaaaauacaauauguaauaagagcucaauuacacgugggugcaaaacaagaaaauuggaauacagacauaaagacacuaaaguucgacgcauuaaguggaucacaagagguagaauuuauaggguacggaaaagcgacuuuagagugucaaguccaaacagcaguagauuucgguaacucauacauagcagaaauggaaacugaaaguuggauaguagauagacaaugggcacaagacuugacacuaccuuggcaaucaggaagcggaggaguauggagagaaaugcaucauuuaguagaauuugaaccaccucaugcagcaacaauaagaguauuagcccuaggaaaccaagaaggaaguuuaaaaacagcacuaacaggagcuaugagaguaacaaaagauacaaaugacaacaaucuauacaaauuacacggaggacauguaagcugccggguaaaguugagcgcacuaacauuaaaaggaacgaguuauaaaauaugcacagauaaaauguucuuuguuaaaaauccuacagauaccggucauggaacaguaguaaugcaaguaaaaguaaguaaaggcgcucccuguagaauaccuguaauagucgcagacgauuuaaccgcagcaauaaauaaaggaauauuagucacgguaaacccaauagcgucaacaaaugaugaugaaguauuaauagaaguuaacccaccuuuuggagacaguuauauaauagucggaaggggugauaguagacuaacauaccaauggcauaaagaaggaagcucaauaggaaaauuauuuacucaaaccaugaaagguguagaaaggcuagcuguuaugggugacacagcaugggauuuuucaagcgcaggaggguucuuuacaucaguagguaaaggaauacauacaguauuuggaagugcauuucaaggauuauuuggugguuuaaauuggauaacaaaaguaauaaugggcgcaguuuuaauauggguagguauaaacacaagaaauaugacaaugucuaugaguaugauauuggucggaguaauaaugauguuuuuaucacuaggagugggugcaugaggacuaguacuggcugcaucucccuuuccucuguccuccauccuucucccaggauggugaagggggaccugguacccagugauccccaccccaggauccuaaaucaugacuuaccugcuaauaaaaacucauuggaaaagugagaagaucuaaaaaaaaaaaaaaaaaaaaaaaaaaaaaaaaaaaaaaaaaaaaaaaaaaaaaaaaaaaaaaaaugcaucccccccccccccccccccccccccccccccaaaggcucuuuucagagccaccagaauu

SEQ ID NO: 1964 - RNA, 2520 nt, Artificial Sequence
  mRNA product Design h-5 comprising derived and/or modified sequence from YFV__NC_002031.1__SSjev(V3)-prME-XX (polyprotein: aa122-788) (opt6)
gggagagggcgcuuggcuugcaaggacccugagcugcggcauugaagcacacccaacccaacucgacugaagucagccucacugaaccggaucugagaaucuucucucucugggcuugccagggcucuccgaaccuagcuagcauccucuucaauuccaacuagaaagcuuaccaugaaugaagguucaauuaugugguuggcaucauuagcaguuguaauugcaugugcuggugcaguuacauuaguaagaaagaaucgauggcugcuuuuaaaugugacaucagaggauuuagggaaaacauuuucgguaggaacaggaaauuguacuacaaauauacuugaagcaaaauauuggugcccagacucuauggaauauaauuguccaaauuuaaguccuagagaagaaccugacgauauagauuguugguguuaugguguagaaaauguaagaguagcauacggcaaaugcgauagugcaggacguucuagacguucaaggagagccauagaucugcccacucacgaaaaucacggauugaaaacacgacaagaaaaauggaugacugggcgaaugggagaaagacaacuacagaaaauugaaagaugguucguuagaaauccauucuuugccguaacagcuuuaacaauagccuauuuaguagguaguaauaugacacaaagaguaguaauagcauugcuaguguuagcaguuggaccagcuuauagugcacauugcauaggaauaacagauagagacuuuauagaaggaguacacgggggaacuuggguaagugccacuuuagaacaagauaaauguguuacagugauggcgccagauaaaccaagucuggacauaaguuuggaaacaguagcgauugauagacccgcagaaguaagaaaaguuuguuauaaugcuguucuaacccauguuaaaauaaaugauaaaugcccuagcaccggagaagcccaucuagcagaagaaaaugaaggagauaacgcauguaaacgaacauacucagauagaggauggggcaacggauguggcuuguuuggaaaagguagcauaguagcaugcgcuaaauuuacaugcgcaaagucaaugucauuauuugaaguagaucaaacaaaaauacaauauguaauaagagcucaauuacacgugggugcaaaacaagaaaauuggaauacagacauaaagacacuaaaguucgacgcauuaaguggaucacaagagguagaauuuauaggguacggaaaagcgacuuuagagugucaaguccaaacagcaguagauuucgguaacucauacauagcagaaauggaaacugaaaguuggauaguagauagacaaugggcacaagacuugacacuaccuuggcaaucaggaagcggaggaguauggagagaaaugcaucauuuaguagaauuugaaccaccucaugcagcaacaauaagaguauuagcccuaggaaaccaagaaggaaguuuaaaaacagcacuaacaggagcuaugagaguaacaaaagauacaaaugacaacaaucuauacaaauuacacggaggacauguaagcugccggguaaaguugagcgcacuaacauuaaaaggaacgaguuauaaaauaugcacagauaaaauguucuuuguuaaaaauccuacagauaccggucauggaacaguaguaaugcaaguaaaaguaaguaaaggcgcucccuguagaauaccuguaauagucgcagacgauuuaaccgcagcaauaaauaaaggaauauuagucacgguaaacccaauagcgucaacaaaugaugaugaaguauuaauagaaguuaacccaccuuuuggagacaguuauauaauagucggaaggggugauaguagacuaacauaccaauggcauaaagaaggaagcucaauaggaaaauuauuuacucaaaccaugaaagguguagaaaggcuagcuguuaugggugacacagcaugggauuuuucaagcgcaggaggguucuuuacaucaguagguaaaggaauacauacaguauuuggaagugcauuucaaggauuauuuggugguuuaaauuggauaacaaaaguaauaaugggcgcaguuuuaauauggguagguauaaacacaagaaauaugacaaugucuaugaguaugauauuggucggaguaauaaugauguuuuuaucacuaggagugggugcagaucaagguugcgcuauuaauuuuggaaaaugaggacuaguacuggcugcaucucccuuuccucuguccuccauccuucucccaggauggugaagggggaccugguacccagugauccccaccccaggauccuaaaucaugacuuaccugcuaauaaaaacucauuggaaaagugagaagaucuaaaaaaaaaaaaaaaaaaaaaaaaaaaaaaaaaaaaaaaaaaaaaaaaaaaaaaaaaaaaaaaaugcaucccccccccccccccccccccccccccccccaaaggcucuuuucagagccaccagaauu

SEQ ID NO: 1965 - RNA, 2529 nt, Artificial Sequence
  mRNA product Design h-5 comprising derived and/or modified sequence from YFV__NC_002031.1__X-SS-prMEdelstem_TM-JEV (polyprotein: aa92-681) (opt11)
gggagagggcgcuuggcuugcaaggacccugagcugcggcauugaagcacacccaacccaacucgacugaagucagccucacugaaccggaucugagaaucuucucucucugggcuugccagggcucuccgaaccuagcuagcauccucuucaauuccaacuagaaagcuuaccaugcggggacuaagcagcagaaaaagacgcagccacgaugugcucaccgugcaauuccucauacuggggaugcuccuaaugaccggaggcgugacccuaguaaggaaaaacagauggcuacuacuaaacguaaccucagaagaucuaggaaagacauuuucagucggcacaggcaacugcacaaccaacauacuagaagcaaaauauuggugcccagacagcauggaauacaacugucccaaccucagcccaagagaggaaccagacgacauagacugcugguguuacggaguagaaaacguaagaguggcauacggcaaaugcgacagcgcaggcaggagccgaagaucccgcagagccaucgacuugcccacgcacgaaaaccacggccucaaaacacgacaagaaaaauggaugacagggcgaaugggagaacgacagcuccagaaaauagaacgaugguucguccggaacccguucuucgcaguaacggcacuaacaaucgcauaccucguaggcagcaacaugacacaaagaguggucaucgcgcuacucguacuagcaguggggcccgcauacagugcacacugcauaggaaucacagaccgugacuucaucgaaggcguacacggaggaacguggguaagcgcgacacuggaacaagacaaaugcgugacaguaauggcaccagacaaaccaagccuagacauaucccuagaaacggucgccaucgaccgucccgcagaaguacgaaagguaugcuauaaugcaguccucacacacgucaaaauaaacgacaaaugccccagcacgggcgaagcacaccucgccgaagaaaacgaaggggauaacgcgugcaaacgcaccuacuccgacaggggauggggcaacggaugcggacuguucggaaaaggauccauagucgcaugcgcaaaauuuaccugcgcaaaaagcaugagcuuguucgagguagaccaaacgaagauccaauacguaauccgagcucaacuacacguuggggccaagcaagagaacuggaauacggacaucaaaacacuaaaauucgacgcacucuccggcucacaagaagucgaguucaucggcuacggcaaagcaacacuagaaugccaaguacaaacagcgguggacuucggcaacagcuacauagcagaaauggaaacagaaagcuggauaguagaccgacaaugggcacaagaccuaacucugccauggcaaagcggcucaggaggaguguggagagagaugcaccaccugguagaguucgaacccccacacgcagcaacaauaaggguacuggcacuaggcaaccaagaaggcagccuaaaaaccgcacucacaggagccaugcgcgugacgaaggacaccaacgacaacaaccucuacaaacuccacggagggcacguauccugccgcguaaaacuaucagcacuaacgcuaaaaggaacaagcuacaaaauaugcacagacaaaauguucuucgucaaaaaccccacagacacaggccacggcacagucguaaugcaagugaaggucagcaagggggcccccugccgaaucccagucauaguggcagacgaccucacggccgccaucaacaaagggauccugguaacagugaacccaauagcaucgaccaacgacgacgaaguccucauagaagugaaucccccguucggcgacagcuacaucaucguaggacgcggcgacucccgacugacguaccaauggcauaaagaaggcagcagcauugggagcacgcucgggaaagcguucucgaccacgcucaagggcgcgcaaaggcucgcggccuugggcgauaccgcgugggauuucgggagcauaggcggggucuuuaacucgaucgggcgcgcgguccaucaaguguucgggggcgcguucaggaccuuguucgggggcaugagcuggaucacgcaagggcucaugggcgcgcucuugcucuggaugggggucaaugccagggacaggagcauagccuuggccuuucucgcgaccgggggcgugcucguguucuuggccacgaacgugcacgcgugaggacuaguacuggcugcaucucccuuuccucuguccuccauccuucucccaggauggugaagggggaccugguacccagugauccccaccccaggauccuaaaucaugacuuaccugcuaauaaaaacucauuggaaaagugagaagaucuaaaaaaaaaaaaaaaaaaaaaaaaaaaaaaaaaaaaaaaaaaaaaaaaaaaaaaaaaaaaaaaaugcaucccccccccccccccccccccccccccccccaaaggcucuuuucagagccaccagaauu

SEQ ID NO: 1966 - RNA, 2502 nt, Artificial Sequence
  mRNA product Design h-5 comprising derived and/or modified sequence from YFV__NC_002031.1__SSjev(V3)-prMEdelstem_TM-JEV (polyprotein: aa122-681) (opt11)
gggagagggcgcuuggcuugcaaggacccugagcugcggcauugaagcacacccaacccaacucgacugaagucagccucacugaaccggaucugagaaucuucucucucugggcuugccagggcucuccgaaccuagcuagcauccucuucaauuccaacuagaaagcuuaccaugaacgagggcucgaucaugugguuggccucgcucgcggucgugaucgcgugcgcgggcgcggugacccuaguaaggaaaaacagauggcuacuacuaaacguaaccucagaagaucuaggaaagacauuuucagucggcacaggcaacugcacaaccaacauacuagaagcaaaauauuggugcccagacagcauggaauacaacugucccaaccucagcccaagagaggaaccagacgacauagacugcugguguuacggaguagaaaacguaagaguggcauacggcaaaugcgacagcgcaggcaggagccgaagaucccgcagagccaucgacuugcccacgcacgaaaaccacggccucaaaacacgacaagaaaaauggaugacagggcgaaugggagaacgacagcuccagaaaauagaacgaugguucguccggaacccguucuucgcaguaacggcacuaacaaucgcauaccucguaggcagcaacaugacacaaagaguggucaucgcgcuacucguacuagcaguggggcccgcauacagugcacacugcauaggaaucacagaccgugacuucaucgaaggcguacacggaggaacguggguaagcgcgacacuggaacaagacaaaugcgugacaguaauggcaccagacaaaccaagccuagacauaucccuagaaacggucgccaucgaccgucccgcagaaguacgaaagguaugcuauaaugcaguccucacacacgucaaaauaaacgacaaaugccccagcacgggcgaagcacaccucgccgaagaaaacgaaggggauaacgcgugcaaacgcaccuacuccgacaggggauggggcaacggaugcggacuguucggaaaaggauccauagucgcaugcgcaaaauuuaccugcgcaaaaagcaugagcuuguucgagguagaccaaacgaagauccaauacguaauccgagcucaacuacacguuggggccaagcaagagaacuggaauacggacaucaaaacacuaaaauucgacgcacucuccggcucacaagaagucgaguucaucggcuacggcaaagcaacacuagaaugccaaguacaaacagcgguggacuucggcaacagcuacauagcagaaauggaaacagaaagcuggauaguagaccgacaaugggcacaagaccuaacucugccauggcaaagcggcucaggaggaguguggagagagaugcaccaccugguagaguucgaacccccacacgcagcaacaauaaggguacuggcacuaggcaaccaagaaggcagccuaaaaaccgcacucacaggagccaugcgcgugacgaaggacaccaacgacaacaaccucuacaaacuccacggagggcacguauccugccgcguaaaacuaucagcacuaacgcuaaaaggaacaagcuacaaaauaugcacagacaaaauguucuucgucaaaaaccccacagacacaggccacggcacagucguaaugcaagugaaggucagcaagggggcccccugccgaaucccagucauaguggcagacgaccucacggccgccaucaacaaagggauccugguaacagugaacccaauagcaucgaccaacgacgacgaaguccucauagaagugaaucccccguucggcgacagcuacaucaucguaggacgcggcgacucccgacugacguaccaauggcauaaagaaggcagcagcauugggagcacgcucgggaaagcguucucgaccacgcucaagggcgcgcaaaggcucgcggccuugggcgauaccgcgugggauuucgggagcauaggcggggucuuuaacucgaucgggcgcgcgguccaucaaguguucgggggcgcguucaggaccuuguucgggggcaugagcuggaucacgcaagggcucaugggcgcgcucuugcucuggaugggggucaaugccagggacaggagcauagccuuggccuuucucgcgaccgggggcgugcucguguucuuggccacgaacgugcacgcgugaggacuaguacuggcugcaucucccuuuccucuguccuccauccuucucccaggauggugaagggggaccugguacccagugauccccaccccaggauccuaaaucaugacuuaccugcuaauaaaaacucauuggaaaagugagaagaucuaaaaaaaaaaaaaaaaaaaaaaaaaaaaaaaaaaaaaaaaaaaaaaaaaaaaaaaaaaaaaaaaugcaucccccccccccccccccccccccccccccccaaaggcucuuuucagagccaccagaauu

SEQ ID NO: 1967 - RNA, 2517 nt, Artificial Sequence
  mRNA product Design h-5 comprising derived and/or modified sequence from YFV__NC_002031.1__X-SS-prME (polyprotein: aa92-778) (opt11)
gggagagggcgcuuggcuugcaaggacccugagcugcggcauugaagcacacccaacccaacucgacugaagucagccucacugaaccggaucugagaaucuucucucucugggcuugccagggcucuccgaaccuagcuagcauccucuucaauuccaacuagaaagcuuaccaugcggggacuaagcagcagaaaaagacgcagccacgaugugcucaccgugcaauuccucauacuggggaugcuccuaaugaccggaggcgugacccuaguaaggaaaaacagauggcuacuacuaaacguaaccucagaagaucuaggaaagacauuuucagucggcacaggcaacugcacaaccaacauacuagaagcaaaauauuggugcccagacagcauggaauacaacugucccaaccucagcccaagagaggaaccagacgacauagacugcugguguuacggaguagaaaacguaagaguggcauacggcaaaugcgacagcgcaggcaggagccgaagaucccgcagagccaucgacuugcccacgcacgaaaaccacggccucaaaacacgacaagaaaaauggaugacagggcgaaugggagaacgacagcuccagaaaauagaacgaugguucguccggaacccguucuucgcaguaacggcacuaacaaucgcauaccucguaggcagcaacaugacacaaagaguggucaucgcgcuacucguacuagcaguggggcccgcauacagugcacacugcauaggaaucacagaccgugacuucaucgaaggcguacacggaggaacguggguaagcgcgacacuggaacaagacaaaugcgugacaguaauggcaccagacaaaccaagccuagacauaucccuagaaacggucgccaucgaccgucccgcagaaguacgaaagguaugcuauaaugcaguccucacacacgucaaaauaaacgacaaaugccccagcacgggcgaagcacaccucgccgaagaaaacgaaggggauaacgcgugcaaacgcaccuacuccgacaggggauggggcaacggaugcggacuguucggaaaaggauccauagucgcaugcgcaaaauuuaccugcgcaaaaagcaugagcuuguucgagguagaccaaacgaagauccaauacguaauccgagcucaacuacacguuggggccaagcaagagaacuggaauacggacaucaaaacacuaaaauucgacgcacucuccggcucacaagaagucgaguucaucggcuacggcaaagcaacacuagaaugccaaguacaaacagcgguggacuucggcaacagcuacauagcagaaauggaaacagaaagcuggauaguagaccgacaaugggcacaagaccuaacucugccauggcaaagcggcucaggaggaguguggagagagaugcaccaccugguagaguucgaacccccacacgcagcaacaauaaggguacuggcacuaggcaaccaagaaggcagccuaaaaaccgcacucacaggagccaugcgcgugacgaaggacaccaacgacaacaaccucuacaaacuccacggagggcacguauccugccgcguaaaacuaucagcacuaacgcuaaaaggaacaagcuacaaaauaugcacagacaaaauguucuucgucaaaaaccccacagacacaggccacggcacagucguaaugcaagugaaggucagcaagggggcccccugccgaaucccagucauaguggcagacgaccucacggccgccaucaacaaagggauccugguaacagugaacccaauagcaucgaccaacgacgacgaaguccucauagaagugaaucccccguucggcgacagcuacaucaucguaggacgcggcgacucccgacugacguaccaauggcauaaagaaggcagcagcauuggaaaacuauucacccaaaccaugaagggcgucgaaagacucgcggugaugggagacaccgcaugggacuucucgagcgcaggcggcuucuucacaagcguaggaaaagggauucacacaguauucggauccgcauuccaaggccucuucgggggacuaaacuggauaacgaaaguaauaaugggagcaguucucauauggguaggaaucaacacacgaaacaugacaauguccaugucaaugauacucguaggcguaaucaugauguuucugucacucggagugggagcaugaggacuaguacuggcugcaucucccuuuccucuguccuccauccuucucccaggauggugaagggggaccugguacccagugauccccaccccaggauccuaaaucaugacuuaccugcuaauaaaaacucauuggaaaagugagaagaucuaaaaaaaaaaaaaaaaaaaaaaaaaaaaaaaaaaaaaaaaaaaaaaaaaaaaaaaaaaaaaaaaugcaucccccccccccccccccccccccccccccccaaaggcucuuuucagagccaccagaauu

SEQ ID NO: 1968 - RNA, 2520 nt, Artificial Sequence
  mRNA product Design h-5 comprising derived and/or modified sequence from YFV__NC_002031.1__SSjev(V3)-prME-XX (polyprotein: aa122-788) (opt11)
gggagagggcgcuuggcuugcaaggacccugagcugcggcauugaagcacacccaacccaacucgacugaagucagccucacugaaccggaucugagaaucuucucucucugggcuugccagggcucuccgaaccuagcuagcauccucuucaauuccaacuagaaagcuuaccaugaacgagggcucgaucaugugguuggccucgcucgcggucgugaucgcgugcgcgggcgcggugacccuaguaaggaaaaacagauggcuacuacuaaacguaaccucagaagaucuaggaaagacauuuucagucggcacaggcaacugcacaaccaacauacuagaagcaaaauauuggugcccagacagcauggaauacaacugucccaaccucagcccaagagaggaaccagacgacauagacugcugguguuacggaguagaaaacguaagaguggcauacggcaaaugcgacagcgcaggcaggagccgaagaucccgcagagccaucgacuugcccacgcacgaaaaccacggccucaaaacacgacaagaaaaauggaugacagggcgaaugggagaacgacagcuccagaaaauagaacgaugguucguccggaacccguucuucgcaguaacggcacuaacaaucgcauaccucguaggcagcaacaugacacaaagaguggucaucgcgcuacucguacuagcaguggggcccgcauacagugcacacugcauaggaaucacagaccgugacuucaucgaaggcguacacggaggaacguggguaagcgcgacacuggaacaagacaaaugcgugacaguaauggcaccagacaaaccaagccuagacauaucccuagaaacggucgccaucgaccgucccgcagaaguacgaaagguaugcuauaaugcaguccucacacacgucaaaauaaacgacaaaugccccagcacgggcgaagcacaccucgccgaagaaaacgaaggggauaacgcgugcaaacgcaccuacuccgacaggggauggggcaacggaugcggacuguucggaaaaggauccauagucgcaugcgcaaaauuuaccugcgcaaaaagcaugagcuuguucgagguagaccaaacgaagauccaauacguaauccgagcucaacuacacguuggggccaagcaagagaacuggaauacggacaucaaaacacuaaaauucgacgcacucuccggcucacaagaagucgaguucaucggcuacggcaaagcaacacuagaaugccaaguacaaacagcgguggacuucggcaacagcuacauagcagaaauggaaacagaaagcuggauaguagaccgacaaugggcacaagaccuaacucugccauggcaaagcggcucaggaggaguguggagagagaugcaccaccugguagaguucgaacccccacacgcagcaacaauaaggguacuggcacuaggcaaccaagaaggcagccuaaaaaccgcacucacaggagccaugcgcgugacgaaggacaccaacgacaacaaccucuacaaacuccacggagggcacguauccugccgcguaaaacuaucagcacuaacgcuaaaaggaacaagcuacaaaauaugcacagacaaaauguucuucgucaaaaaccccacagacacaggccacggcacagucguaaugcaagugaaggucagcaagggggcccccugccgaaucccagucauaguggcagacgaccucacggccgccaucaacaaagggauccugguaacagugaacccaauagcaucgaccaacgacgacgaaguccucauagaagugaaucccccguucggcgacagcuacaucaucguaggacgcggcgacucccgacugacguaccaauggcauaaagaaggcagcagcauuggaaaacuauucacccaaaccaugaagggcgucgaaagacucgcggugaugggagacaccgcaugggacuucucgagcgcaggcggcuucuucacaagcguaggaaaagggauucacacaguauucggauccgcauuccaaggccucuucgggggacuaaacuggauaacgaaaguaauaaugggagcaguucucauauggguaggaaucaacacacgaaacaugacaauguccaugucaaugauacucguaggcguaaucaugauguuucugucacucggagugggagcagaccaagguugcgccauaaacuucggcaagugaggacuaguacuggcugcaucucccuuuccucuguccuccauccuucucccaggauggugaagggggaccugguacccagugauccccaccccaggauccuaaaucaugacuuaccugcuaauaaaaacucauuggaaaagugagaagaucuaaaaaaaaaaaaaaaaaaaaaaaaaaaaaaaaaaaaaaaaaaaaaaaaaaaaaaaaaaaaaaaaugcaucccccccccccccccccccccccccccccccaaaggcucuuuucagagccaccagaauu

SEQ ID NO: 1969 - RNA, 2458 nt, Artificial Sequence
  mRNA product Design i-2 comprising derived and/or modified sequence from YFV__NC_002031.1__X-SS-prMEdelstem_TM-JEV (polyprotein: aa92-681) (wt)
ggggcgcugccuacggagguggcagccaucuccuucucggcaucaagcuuaccaugagaggauuguccucaaggaaacgccguucccaugauguucugacugugcaauuccuaauuuugggaaugcuguugaugacggguggagugaccuuggugcggaaaaacagaugguugcuccuaaaugugacaucugaggaccucgggaaaacauucucugugggcacaggcaacugcacaacaaacauuuuggaagccaaguacuggugcccagacucaauggaauacaacugucccaaucucaguccaagagaggagccagaugacauugauugcuggugcuaugggguggaaaacguuagagucgcauaugguaagugugacucagcaggcaggucuaggaggucaagaagggccauugacuugccuacgcaugaaaaccaugguuugaagacccggcaagaaaaauggaugacuggaagaaugggugaaaggcaacuccaaaagauugagagaugguucgugaggaaccccuuuuuugcagugacggcucugaccauugccuaccuugugggaagcaacaugacgcaacgagucgugauugcccuacuggucuuggcuguugguccggccuacucagcucacugcauuggaauuacugacagggauuucauugagggggugcauggaggaacuuggguuucagcuacccuggagcaagacaagugugucacuguuauggccccugacaagccuucauuggacaucucacuagagacaguagccauugauagaccugcugaggugaggaaaguguguuacaaugcaguucucacucaugugaagauuaaugacaagugccccagcacuggagaggcccaccuagcugaagagaacgaaggggacaaugcgugcaagcgcacuuauucugauagaggcuggggcaauggcuguggccuauuugggaaagggagcauuguggcaugcgccaaauucacuugugccaaauccaugaguuuguuugagguugaucagaccaaaauucaguaugucaucagagcacaauugcauguaggggccaagcaggaaaauuggaauaccgacauuaagacucucaaguuugaugcccugucaggcucccaggaagucgaguucauuggguauggaaaagcuacacuggaaugccaggugcaaacugcgguggacuuugguaacaguuacaucgcugagauggaaacagagagcuggauaguggacagacagugggcccaggacuugacccugccauggcagaguggaaguggcgggguguggagagagaugcaucaucuugucgaauuugaaccuccgcaugccgccacuaucagaguacuggcccugggaaaccaggaaggcuccuugaaaacagcucuuacuggcgcaaugaggguuacaaaggacacaaaugacaacaaccuuuacaaacuacaugguggacauguuucuugcagagugaaauugucagcuuugacacucaaggggacauccuacaaaauaugcacugacaaaauguuuuuugucaagaacccaacugacacuggccauggcacuguugugaugcaggugaaagugucaaaaggagcccccugcaggauuccagugauaguagcugaugaucuuacagcggcaaucaauaaaggcauuuugguuacaguuaaccccaucgccucaaccaaugaugaugaagugcugauugaggugaacccaccuuuuggagacagcuacauuaucguugggagaggagauucacgucucacuuaccaguggcacaaagagggaagcucaauaggcagcacgcugggcaaggccuuuucaacaacuuugaagggagcucaaagacuggcagcguugggcgacacagccugggacuuuggcucuauuggaggggucuucaacuccauaggaagagccguucaccaaguguuugguggugccuucagaacacucuuugggggaaugucuuggaucacacaagggcuaaugggugcccuacugcucuggaugggcgucaacgcacgagaccgaucaauugcuuuggccuucuuagccacaggaggugugcucguguucuuagcgaccaaugugcacgccuaaggacuagugcaucacauuuaaaagcaucucagccuaccaugagaauaagagaaagaaaaugaagaucaauagcuuauucaucucuuuuucuuuuucguugguguaaagccaacacccugucuaaaaaacauaaauuucuuuaaucauuuugccucuuuucucugugcuucaauuaauaaaaaauggaaagaaccuagaucuaaaaaaaaaaaaaaaaaaaaaaaaaaaaaaaaaaaaaaaaaaaaaaaaaaaaaaaaaaaaaaaaugcaucccccccccccccccccccccccccccccccaaaggcucuuuucagagccaccagaauu

SEQ ID NO: 1970 - RNA, 2431 nt, Artificial Sequence
  mRNA product Design i-2 comprising derived and/or modified sequence from YFV__NC_002031.1__SSjev(V3)-prMEdelstem_TM-JEV (polyprotein: aa122-681) (wt)
ggggcgcugccuacggagguggcagccaucuccuucucggcaucaagcuuaccaugaaugaaggcucaaucauguggcucgcgagcuuggcaguugucauagcuugugcaggagccgugaccuuggugcggaaaaacagaugguugcuccuaaaugugacaucugaggaccucgggaaaacauucucugugggcacaggcaacugcacaacaaacauuuuggaagccaaguacuggugcccagacucaauggaauacaacugucccaaucucaguccaagagaggagccagaugacauugauugcuggugcuaugggguggaaaacguuagagucgcauaugguaagugugacucagcaggcaggucuaggaggucaagaagggccauugacuugccuacgcaugaaaaccaugguuugaagacccggcaagaaaaauggaugacuggaagaaugggugaaaggcaacuccaaaagauugagagaugguucgugaggaaccccuuuuuugcagugacggcucugaccauugccuaccuugugggaagcaacaugacgcaacgagucgugauugcccuacuggucuuggcuguugguccggccuacucagcucacugcauuggaauuacugacagggauuucauugagggggugcauggaggaacuuggguuucagcuacccuggagcaagacaagugugucacuguuauggccccugacaagccuucauuggacaucucacuagagacaguagccauugauagaccugcugaggugaggaaaguguguuacaaugcaguucucacucaugugaagauuaaugacaagugccccagcacuggagaggcccaccuagcugaagagaacgaaggggacaaugcgugcaagcgcacuuauucugauagaggcuggggcaauggcuguggccuauuugggaaagggagcauuguggcaugcgccaaauucacuugugccaaauccaugaguuuguuugagguugaucagaccaaaauucaguaugucaucagagcacaauugcauguaggggccaagcaggaaaauuggaauaccgacauuaagacucucaaguuugaugcccugucaggcucccaggaagucgaguucauuggguauggaaaagcuacacuggaaugccaggugcaaacugcgguggacuuugguaacaguuacaucgcugagauggaaacagagagcuggauaguggacagacagugggcccaggacuugacccugccauggcagaguggaaguggcgggguguggagagagaugcaucaucuugucgaauuugaaccuccgcaugccgccacuaucagaguacuggcccugggaaaccaggaaggcuccuugaaaacagcucuuacuggcgcaaugaggguuacaaaggacacaaaugacaacaaccuuuacaaacuacaugguggacauguuucuugcagagugaaauugucagcuuugacacucaaggggacauccuacaaaauaugcacugacaaaauguuuuuugucaagaacccaacugacacuggccauggcacuguugugaugcaggugaaagugucaaaaggagcccccugcaggauuccagugauaguagcugaugaucuuacagcggcaaucaauaaaggcauuuugguuacaguuaaccccaucgccucaaccaaugaugaugaagugcugauugaggugaacccaccuuuuggagacagcuacauuaucguugggagaggagauucacgucucacuuaccaguggcacaaagagggaagcucaauaggcagcacgcugggcaaggccuuuucaacaacuuugaagggagcucaaagacuggcagcguugggcgacacagccugggacuuuggcucuauuggaggggucuucaacuccauaggaagagccguucaccaaguguuugguggugccuucagaacacucuuugggggaaugucuuggaucacacaagggcuaaugggugcccuacugcucuggaugggcgucaacgcacgagaccgaucaauugcuuuggccuucuuagccacaggaggugugcucguguucuuagcgaccaaugugcacgccuaaggacuagugcaucacauuuaaaagcaucucagccuaccaugagaauaagagaaagaaaaugaagaucaauagcuuauucaucucuuuuucuuuuucguugguguaaagccaacacccugucuaaaaaacauaaauuucuuuaaucauuuugccucuuuucucugugcuucaauuaauaaaaaauggaaagaaccuagaucuaaaaaaaaaaaaaaaaaaaaaaaaaaaaaaaaaaaaaaaaaaaaaaaaaaaaaaaaaaaaaaaaugcaucccccccccccccccccccccccccccccccaaaggcucuuuucagagccaccagaauu

SEQ ID NO: 1971 - RNA, 2446 nt, Artificial Sequence
  mRNA product Design i-2 comprising derived and/or modified sequence from YFV__NC_002031.1__X-SS-prME (polyprotein: aa92-778) (wt)
ggggcgcugccuacggagguggcagccaucuccuucucggcaucaagcuuaccaugagaggauuguccucaaggaaacgccguucccaugauguucugacugugcaauuccuaauuuugggaaugcuguugaugacggguggagugaccuuggugcggaaaaacagaugguugcuccuaaaugugacaucugaggaccucgggaaaacauucucugugggcacaggcaacugcacaacaaacauuuuggaagccaaguacuggugcccagacucaauggaauacaacugucccaaucucaguccaagagaggagccagaugacauugauugcuggugcuaugggguggaaaacguuagagucgcauaugguaagugugacucagcaggcaggucuaggaggucaagaagggccauugacuugccuacgcaugaaaaccaugguuugaagacccggcaagaaaaauggaugacuggaagaaugggugaaaggcaacuccaaaagauugagagaugguucgugaggaaccccuuuuuugcagugacggcucugaccauugccuaccuugugggaagcaacaugacgcaacgagucgugauugcccuacuggucuuggcuguugguccggccuacucagcucacugcauuggaauuacugacagggauuucauugagggggugcauggaggaacuuggguuucagcuacccuggagcaagacaagugugucacuguuauggccccugacaagccuucauuggacaucucacuagagacaguagccauugauagaccugcugaggugaggaaaguguguuacaaugcaguucucacucaugugaagauuaaugacaagugccccagcacuggagaggcccaccuagcugaagagaacgaaggggacaaugcgugcaagcgcacuuauucugauagaggcuggggcaauggcuguggccuauuugggaaagggagcauuguggcaugcgccaaauucacuugugccaaauccaugaguuuguuugagguugaucagaccaaaauucaguaugucaucagagcacaauugcauguaggggccaagcaggaaaauuggaauaccgacauuaagacucucaaguuugaugcccugucaggcucccaggaagucgaguucauuggguauggaaaagcuacacuggaaugccaggugcaaacugcgguggacuuugguaacaguuacaucgcugagauggaaacagagagcuggauaguggacagacagugggcccaggacuugacccugccauggcagaguggaaguggcgggguguggagagagaugcaucaucuugucgaauuugaaccuccgcaugccgccacuaucagaguacuggcccugggaaaccaggaaggcuccuugaaaacagcucuuacuggcgcaaugaggguuacaaaggacacaaaugacaacaaccuuuacaaacuacaugguggacauguuucuugcagagugaaauugucagcuuugacacucaaggggacauccuacaaaauaugcacugacaaaauguuuuuugucaagaacccaacugacacuggccauggcacuguugugaugcaggugaaagugucaaaaggagcccccugcaggauuccagugauaguagcugaugaucuuacagcggcaaucaauaaaggcauuuugguuacaguuaaccccaucgccucaaccaaugaugaugaagugcugauugaggugaacccaccuuuuggagacagcuacauuaucguugggagaggagauucacgucucacuuaccaguggcacaaagagggaagcucaauaggaaaguuguucacucagaccaugaaaggcguggaacgccuggccgucaugggagacaccgccugggauuucagcuccgcuggaggguucuucacuucgguugggaaaggaauccauacgguguuuggcucugccuuucaggggcuauuuggcggcuugaacuggauaacaaaggucaucaugggggcgguacuuauauggguuggcaucaacacaagaaacaugacaauguccaugagcaugaucuugguaggagugaucaugauguuuuugucucuaggaguuggggcguaaggacuagugcaucacauuuaaaagcaucucagccuaccaugagaauaagagaaagaaaaugaagaucaauagcuuauucaucucuuuuucuuuuucguugguguaaagccaacacccugucuaaaaaacauaaauuucuuuaaucauuuugccucuuuucucugugcuucaauuaauaaaaaauggaaagaaccuagaucuaaaaaaaaaaaaaaaaaaaaaaaaaaaaaaaaaaaaaaaaaaaaaaaaaaaaaaaaaaaaaaaaugcaucccccccccccccccccccccccccccccccaaaggcucuuuucagagccaccagaauu

SEQ ID NO: 1972 - RNA, 2449 nt, Artificial Sequence
  mRNA product Design i-2 comprising derived and/or modified sequence from YFV__NC_002031.1__SSjev(V3)-prME-XX (polyprotein: aa122-788) (wt)
ggggcgcugccuacggagguggcagccaucuccuucucggcaucaagcuuaccaugaaugaaggcucaaucauguggcucgcgagcuuggcaguugucauagcuugugcaggagccgugaccuuggugcggaaaaacagaugguugcuccuaaaugugacaucugaggaccucgggaaaacauucucugugggcacaggcaacugcacaacaaacauuuuggaagccaaguacuggugcccagacucaauggaauacaacugucccaaucucaguccaagagaggagccagaugacauugauugcuggugcuaugggguggaaaacguuagagucgcauaugguaagugugacucagcaggcaggucuaggaggucaagaagggccauugacuugccuacgcaugaaaaccaugguuugaagacccggcaagaaaaauggaugacuggaagaaugggugaaaggcaacuccaaaagauugagagaugguucgugaggaaccccuuuuuugcagugacggcucugaccauugccuaccuugugggaagcaacaugacgcaacgagucgugauugcccuacuggucuuggcuguugguccggccuacucagcucacugcauuggaauuacugacagggauuucauugagggggugcauggaggaacuuggguuucagcuacccuggagcaagacaagugugucacuguuauggccccugacaagccuucauuggacaucucacuagagacaguagccauugauagaccugcugaggugaggaaaguguguuacaaugcaguucucacucaugugaagauuaaugacaagugccccagcacuggagaggcccaccuagcugaagagaacgaaggggacaaugcgugcaagcgcacuuauucugauagaggcuggggcaauggcuguggccuauuugggaaagggagcauuguggcaugcgccaaauucacuugugccaaauccaugaguuuguuugagguugaucagaccaaaauucaguaugucaucagagcacaauugcauguaggggccaagcaggaaaauuggaauaccgacauuaagacucucaaguuugaugcccugucaggcucccaggaagucgaguucauuggguauggaaaagcuacacuggaaugccaggugcaaacugcgguggacuuugguaacaguuacaucgcugagauggaaacagagagcuggauaguggacagacagugggcccaggacuugacccugccauggcagaguggaaguggcgggguguggagagagaugcaucaucuugucgaauuugaaccuccgcaugccgccacuaucagaguacuggcccugggaaaccaggaaggcuccuugaaaacagcucuuacuggcgcaaugaggguuacaaaggacacaaaugacaacaaccuuuacaaacuacaugguggacauguuucuugcagagugaaauugucagcuuugacacucaaggggacauccuacaaaauaugcacugacaaaauguuuuuugucaagaacccaacugacacuggccauggcacuguugugaugcaggugaaagugucaaaaggagcccccugcaggauuccagugauaguagcugaugaucuuacagcggcaaucaauaaaggcauuuugguuacaguuaaccccaucgccucaaccaaugaugaugaagugcugauugaggugaacccaccuuuuggagacagcuacauuaucguugggagaggagauucacgucucacuuaccaguggcacaaagagggaagcucaauaggaaaguuguucacucagaccaugaaaggcguggaacgccuggccgucaugggagacaccgccugggauuucagcuccgcuggaggguucuucacuucgguugggaaaggaauccauacgguguuuggcucugccuuucaggggcuauuuggcggcuugaacuggauaacaaaggucaucaugggggcgguacuuauauggguuggcaucaacacaagaaacaugacaauguccaugagcaugaucuugguaggagugaucaugauguuuuugucucuaggaguuggggcggaucaaggaugcgccaucaacuuuggcaaguaaggacuagugcaucacauuuaaaagcaucucagccuaccaugagaauaagagaaagaaaaugaagaucaauagcuuauucaucucuuuuucuuuuucguugguguaaagccaacacccugucuaaaaaacauaaauuucuuuaaucauuuugccucuuuucucugugcuucaauuaauaaaaaauggaaagaaccuagaucuaaaaaaaaaaaaaaaaaaaaaaaaaaaaaaaaaaaaaaaaaaaaaaaaaaaaaaaaaaaaaaaaugcaucccccccccccccccccccccccccccccccaaaggcucuuuucagagccaccagaauu

SEQ ID NO: 1973 - RNA, 2458 nt, Artificial Sequence
  mRNA product Design i-2 comprising derived and/or modified sequence from YFV__NC_002031.1__X-SS-prMEdelstem_TM-JEV (polyprotein: aa92-681) (opt1)
ggggcgcugccuacggagguggcagccaucuccuucucggcaucaagcuuaccaugcggggccugagcucccgcaagcggcgcagccacgacgugcucaccguccaguuccugauccuggggaugcuccugaugaccggcggggugacgcuggugcggaagaaccgcuggcuccugcugaacgucaccuccgaggaccucggcaagaccuucagcguggggaccggcaacugcacgaccaacauccuggaggccaaguacuggugccccgacuccauggaguacaacugcccgaaccugagcccccgggaggagcccgacgacaucgacugcuggugcuacggcguggagaacguccgcguggccuacgggaagugcgacuccgcgggccggagccgccggucccgccgggccaucgaccuccccacccacgagaaccacgggcugaagacccgccaggagaaguggaugacgggccggaugggggagcgccagcugcagaagaucgagcggugguucgugcgcaacccguucuucgccgucaccgcccucaccaucgccuaccuggugggcagcaacaugacccagcggguggucaucgcgcugcucgugcuggccgugggccccgccuacuccgcccacugcaucgggaucacggaccgcgacuucaucgagggcguccacgggggcaccugggugagcgcgacccuggagcaggacaagugcgugaccgucauggcccccgacaagcccucccucgacaucagccuggagacgguggccaucgaccggccggccgaggugcgcaaggucugcuacaacgccgugcugacccacgugaagaucaacgacaagugccccuccaccggcgaggcgcaccucgccgaggagaacgagggggacaacgccugcaagcggaccuacagcgaccggggcugggggaacggcugcgggcuguucggcaagggcuccaucgucgccugcgccaaguucacgugcgcgaagagcaugucccuguucgagguggaccagaccaagauccaguacgucauccgcgcccagcuccacgugggggccaagcaggagaacuggaacaccgacaucaagacccugaaguucgacgcccugagcggcagccaggagguggaguucaucggguacggcaaggccacgcucgagugccagguccagaccgcgguggacuucgggaacuccuacaucgccgagauggagaccgagagcuggaucguggaccggcagugggcccaggaccugacccugcccuggcaguccggcagcggcggggucuggcgcgagaugcaccaccucguggaguucgagcccccgcacgccgccacgauccgggugcuggcgcugggcaaccaggaggggucccucaagaccgcccugaccggcgccaugcgcgucaccaaggacacgaacgacaacaaccuguacaagcuccacgggggccacgugagcugccgggugaagcuguccgcccugacccucaagggcaccagcuacaagaucugcaccgacaagauguucuucgucaagaaccccacggacaccgggcacggcaccguggugaugcaggucaagguguccaagggggcgcccugccgcaucccggugaucgucgccgacgaccugaccgccgccaucaacaagggcauccuggugaccgugaacccgaucgccagcacgaacgacgacgagguccucaucgaggugaacccccccuucggcgacuccuacaucaucguggggcggggcgacagccgccugaccuaccaguggcacaaggagggguccagcaucggcagcacccuggggaaggccuucuccaccacgcucaagggcgcccagcgccuggcggcccugggggacaccgccugggacuucggcagcaucgggggcguguucaacuccaucggccgggccguccaccagguguucgggggcgccuuccgcacccucuucgggggcaugagcuggaucacccaggggcugaugggcgcgcugcuccuguggaugggggugaacgcccgggaccgcuccaucgcccuggccuuccucgcgacgggcggcguccugguguuccuggccaccaacgugcacgccugaggacuagugcaucacauuuaaaagcaucucagccuaccaugagaauaagagaaagaaaaugaagaucaauagcuuauucaucucuuuuucuuuuucguugguguaaagccaacacccugucuaaaaaacauaaauuucuuuaaucauuuugccucuuuucucugugcuucaauuaauaaaaaauggaaagaaccuagaucuaaaaaaaaaaaaaaaaaaaaaaaaaaaaaaaaaaaaaaaaaaaaaaaaaaaaaaaaaaaaaaaaugcaucccccccccccccccccccccccccccccccaaaggcucuuuucagagccaccagaauu

SEQ ID NO: 1974 - RNA, 2431 nt, Artificial Sequence
  mRNA product Design i-2 comprising derived and/or modified sequence from YFV__NC_002031.1__SSjev(V3)-prMEdelstem_TM-JEV (polyprotein: aa122-681) (opt1)
ggggcgcugccuacggagguggcagccaucuccuucucggcaucaagcuuaccaugaacgagggcagcaucauguggcuggccucccucgccguggucaucgcgugcgccggggccgugacgcuggugcggaagaaccgcuggcuccugcugaacgucaccuccgaggaccucggcaagaccuucagcguggggaccggcaacugcacgaccaacauccuggaggccaaguacuggugccccgacuccauggaguacaacugcccgaaccugagcccccgggaggagcccgacgacaucgacugcuggugcuacggcguggagaacguccgcguggccuacgggaagugcgacuccgcgggccggagccgccggucccgccgggccaucgaccuccccacccacgagaaccacgggcugaagacccgccaggagaaguggaugacgggccggaugggggagcgccagcugcagaagaucgagcggugguucgugcgcaacccguucuucgccgucaccgcccucaccaucgccuaccuggugggcagcaacaugacccagcggguggucaucgcgcugcucgugcuggccgugggccccgccuacuccgcccacugcaucgggaucacggaccgcgacuucaucgagggcguccacgggggcaccugggugagcgcgacccuggagcaggacaagugcgugaccgucauggcccccgacaagcccucccucgacaucagccuggagacgguggccaucgaccggccggccgaggugcgcaaggucugcuacaacgccgugcugacccacgugaagaucaacgacaagugccccuccaccggcgaggcgcaccucgccgaggagaacgagggggacaacgccugcaagcggaccuacagcgaccggggcugggggaacggcugcgggcuguucggcaagggcuccaucgucgccugcgccaaguucacgugcgcgaagagcaugucccuguucgagguggaccagaccaagauccaguacgucauccgcgcccagcuccacgugggggccaagcaggagaacuggaacaccgacaucaagacccugaaguucgacgcccugagcggcagccaggagguggaguucaucggguacggcaaggccacgcucgagugccagguccagaccgcgguggacuucgggaacuccuacaucgccgagauggagaccgagagcuggaucguggaccggcagugggcccaggaccugacccugcccuggcaguccggcagcggcggggucuggcgcgagaugcaccaccucguggaguucgagcccccgcacgccgccacgauccgggugcuggcgcugggcaaccaggaggggucccucaagaccgcccugaccggcgccaugcgcgucaccaaggacacgaacgacaacaaccuguacaagcuccacgggggccacgugagcugccgggugaagcuguccgcccugacccucaagggcaccagcuacaagaucugcaccgacaagauguucuucgucaagaaccccacggacaccgggcacggcaccguggugaugcaggucaagguguccaagggggcgcccugccgcaucccggugaucgucgccgacgaccugaccgccgccaucaacaagggcauccuggugaccgugaacccgaucgccagcacgaacgacgacgagguccucaucgaggugaacccccccuucggcgacuccuacaucaucguggggcggggcgacagccgccugaccuaccaguggcacaaggagggguccagcaucggcagcacccuggggaaggccuucuccaccacgcucaagggcgcccagcgccuggcggcccugggggacaccgccugggacuucggcagcaucgggggcguguucaacuccaucggccgggccguccaccagguguucgggggcgccuuccgcacccucuucgggggcaugagcuggaucacccaggggcugaugggcgcgcugcuccuguggaugggggugaacgcccgggaccgcuccaucgcccuggccuuccucgcgacgggcggcguccugguguuccuggccaccaacgugcacgccugaggacuagugcaucacauuuaaaagcaucucagccuaccaugagaauaagagaaagaaaaugaagaucaauagcuuauucaucucuuuuucuuuuucguugguguaaagccaacacccugucuaaaaaacauaaauuucuuuaaucauuuugccucuuuucucugugcuucaauuaauaaaaaauggaaagaaccuagaucuaaaaaaaaaaaaaaaaaaaaaaaaaaaaaaaaaaaaaaaaaaaaaaaaaaaaaaaaaaaaaaaaugcaucccccccccccccccccccccccccccccccaaaggcucuuuucagagccaccagaauu

SEQ ID NO: 1975 - RNA, 2446 nt, Artificial Sequence
  mRNA product Design i-2 comprising derived and/or modified sequence from YFV__NC_002031.1__X-SS-prME (polyprotein: aa92-778) (opt1)
ggggcgcugccuacggagguggcagccaucuccuucucggcaucaagcuuaccaugcggggccugagcucccgcaagcggcgcagccacgacgugcucaccguccaguuccugauccuggggaugcuccugaugaccggcggggugacgcuggugcggaagaaccgcuggcuccugcugaacgucaccuccgaggaccucggcaagaccuucagcguggggaccggcaacugcacgaccaacauccuggaggccaaguacuggugccccgacuccauggaguacaacugcccgaaccugagcccccgggaggagcccgacgacaucgacugcuggugcuacggcguggagaacguccgcguggccuacgggaagugcgacuccgcgggccggagccgccggucccgccgggccaucgaccuccccacccacgagaaccacgggcugaagacccgccaggagaaguggaugacgggccggaugggggagcgccagcugcagaagaucgagcggugguucgugcgcaacccguucuucgccgucaccgcccucaccaucgccuaccuggugggcagcaacaugacccagcggguggucaucgcgcugcucgugcuggccgugggccccgccuacuccgcccacugcaucgggaucacggaccgcgacuucaucgagggcguccacgggggcaccugggugagcgcgacccuggagcaggacaagugcgugaccgucauggcccccgacaagcccucccucgacaucagccuggagacgguggccaucgaccggccggccgaggugcgcaaggucugcuacaacgccgugcugacccacgugaagaucaacgacaagugccccuccaccggcgaggcgcaccucgccgaggagaacgagggggacaacgccugcaagcggaccuacagcgaccggggcugggggaacggcugcgggcuguucggcaagggcuccaucgucgccugcgccaaguucacgugcgcgaagagcaugucccuguucgagguggaccagaccaagauccaguacgucauccgcgcccagcuccacgugggggccaagcaggagaacuggaacaccgacaucaagacccugaaguucgacgcccugagcggcagccaggagguggaguucaucggguacggcaaggccacgcucgagugccagguccagaccgcgguggacuucgggaacuccuacaucgccgagauggagaccgagagcuggaucguggaccggcagugggcccaggaccugacccugcccuggcaguccggcagcggcggggucuggcgcgagaugcaccaccucguggaguucgagcccccgcacgccgccacgauccgggugcuggcgcugggcaaccaggaggggucccucaagaccgcccugaccggcgccaugcgcgucaccaaggacacgaacgacaacaaccuguacaagcuccacgggggccacgugagcugccgggugaagcuguccgcccugacccucaagggcaccagcuacaagaucugcaccgacaagauguucuucgucaagaaccccacggacaccgggcacggcaccguggugaugcaggucaagguguccaagggggcgcccugccgcaucccggugaucgucgccgacgaccugaccgccgccaucaacaagggcauccuggugaccgugaacccgaucgccagcacgaacgacgacgagguccucaucgaggugaacccccccuucggcgacuccuacaucaucguggggcggggcgacagccgccugaccuaccaguggcacaaggagggguccagcaucggcaagcuguucacccagaccaugaagggggucgagcggcuggcggugaugggcgacacggccugggacuucuccagcgccggcggguucuucaccuccgugggcaaggggauccacaccgucuucggcagcgccuuccaggggcucuucggcggccugaacuggaucaccaaggugaucaugggggccgugcugaucugggucggcaucaacacgcgcaacaugaccauguccaugagcaugauccucgugggggugaucaugauguuccugagccugggcgucggggcgugaggacuagugcaucacauuuaaaagcaucucagccuaccaugagaauaagagaaagaaaaugaagaucaauagcuuauucaucucuuuuucuuuuucguugguguaaagccaacacccugucuaaaaaacauaaauuucuuuaaucauuuugccucuuuucucugugcuucaauuaauaaaaaauggaaagaaccuagaucuaaaaaaaaaaaaaaaaaaaaaaaaaaaaaaaaaaaaaaaaaaaaaaaaaaaaaaaaaaaaaaaaugcaucccccccccccccccccccccccccccccccaaaggcucuuuucagagccaccagaauu

SEQ ID NO: 1976 - RNA, 2449 nt, Artificial Sequence
  mRNA product Design i-2 comprising derived and/or modified sequence from YFV__NC_002031.1__SSjev(V3)-prME-XX (polyprotein: aa122-788) (opt1)
ggggcgcugccuacggagguggcagccaucuccuucucggcaucaagcuuaccaugaacgagggcagcaucauguggcuggccucccucgccguggucaucgcgugcgccggggccgugacgcuggugcggaagaaccgcuggcuccugcugaacgucaccuccgaggaccucggcaagaccuucagcguggggaccggcaacugcacgaccaacauccuggaggccaaguacuggugccccgacuccauggaguacaacugcccgaaccugagcccccgggaggagcccgacgacaucgacugcuggugcuacggcguggagaacguccgcguggccuacgggaagugcgacuccgcgggccggagccgccggucccgccgggccaucgaccuccccacccacgagaaccacgggcugaagacccgccaggagaaguggaugacgggccggaugggggagcgccagcugcagaagaucgagcggugguucgugcgcaacccguucuucgccgucaccgcccucaccaucgccuaccuggugggcagcaacaugacccagcggguggucaucgcgcugcucgugcuggccgugggccccgccuacuccgcccacugcaucgggaucacggaccgcgacuucaucgagggcguccacgggggcaccugggugagcgcgacccuggagcaggacaagugcgugaccgucauggcccccgacaagcccucccucgacaucagccuggagacgguggccaucgaccggccggccgaggugcgcaaggucugcuacaacgccgugcugacccacgugaagaucaacgacaagugccccuccaccggcgaggcgcaccucgccgaggagaacgagggggacaacgccugcaagcggaccuacagcgaccggggcugggggaacggcugcgggcuguucggcaagggcuccaucgucgccugcgccaaguucacgugcgcgaagagcaugucccuguucgagguggaccagaccaagauccaguacgucauccgcgcccagcuccacgugggggccaagcaggagaacuggaacaccgacaucaagacccugaaguucgacgcccugagcggcagccaggagguggaguucaucggguacggcaaggccacgcucgagugccagguccagaccgcgguggacuucgggaacuccuacaucgccgagauggagaccgagagcuggaucguggaccggcagugggcccaggaccugacccugcccuggcaguccggcagcggcggggucuggcgcgagaugcaccaccucguggaguucgagcccccgcacgccgccacgauccgggugcuggcgcugggcaaccaggaggggucccucaagaccgcccugaccggcgccaugcgcgucaccaaggacacgaacgacaacaaccuguacaagcuccacgggggccacgugagcugccgggugaagcuguccgcccugacccucaagggcaccagcuacaagaucugcaccgacaagauguucuucgucaagaaccccacggacaccgggcacggcaccguggugaugcaggucaagguguccaagggggcgcccugccgcaucccggugaucgucgccgacgaccugaccgccgccaucaacaagggcauccuggugaccgugaacccgaucgccagcacgaacgacgacgagguccucaucgaggugaacccccccuucggcgacuccuacaucaucguggggcggggcgacagccgccugaccuaccaguggcacaaggagggguccagcaucggcaagcuguucacccagaccaugaagggggucgagcggcuggcggugaugggcgacacggccugggacuucuccagcgccggcggguucuucaccuccgugggcaaggggauccacaccgucuucggcagcgccuuccaggggcucuucggcggccugaacuggaucaccaaggugaucaugggggccgugcugaucugggucggcaucaacacgcgcaacaugaccauguccaugagcaugauccucgugggggugaucaugauguuccugagccugggcgucggggcggaccagggcugcgccaucaacuucggcaagugaggacuagugcaucacauuuaaaagcaucucagccuaccaugagaauaagagaaagaaaaugaagaucaauagcuuauucaucucuuuuucuuuuucguugguguaaagccaacacccugucuaaaaaacauaaauuucuuuaaucauuuugccucuuuucucugugcuucaauuaauaaaaaauggaaagaaccuagaucuaaaaaaaaaaaaaaaaaaaaaaaaaaaaaaaaaaaaaaaaaaaaaaaaaaaaaaaaaaaaaaaaugcaucccccccccccccccccccccccccccccccaaaggcucuuuucagagccaccagaauu

SEQ ID NO: 1977 - RNA, 2458 nt, Artificial Sequence
  mRNA product Design i-2 comprising derived and/or modified sequence from YFV__NC_002031.1__X-SS-prMEdelstem_TM-JEV (polyprotein: aa92-681) (opt1)
ggggcgcugccuacggagguggcagccaucuccuucucggcaucaagcuuaccaugcggggccugagcucccgcaagcggcgcagccacgacgugcucaccguccaguuccugauccuggggaugcuccugaugaccggcggggugacgcuggugcggaagaaccgcuggcuccugcugaacgucaccuccgaggaccucggcaagaccuucagcguggggaccggcaacugcacgaccaacauccuggaggccaaguacuggugccccgacuccauggaguacaacugcccgaaccugagcccccgggaggagcccgacgacaucgacugcuggugcuacggcguggagaacguccgcguggccuacgggaagugcgacuccgcgggccggagccgccggucccgccgggccaucgaccuccccacccacgagaaccacgggcugaagacccgccaggagaaguggaugacgggccggaugggggagcgccagcugcagaagaucgagcggugguucgugcgcaacccguucuucgccgucaccgcccucaccaucgccuaccuggugggcagcaacaugacccagcggguggucaucgcgcugcucgugcuggccgugggccccgccuacuccgcccacugcaucgggaucacggaccgcgacuucaucgagggcguccacgggggcaccugggugagcgcgacccuggagcaggacaagugcgugaccgucauggcccccgacaagcccucccucgacaucagccuggagacgguggccaucgaccggccggccgaggugcgcaaggucugcuacaacgccgugcugacccacgugaagaucaacgacaagugccccuccaccggcgaggcgcaccucgccgaggagaacgagggggacaacgccugcaagcggaccuacagcgaccggggcugggggaacggcugcgggcuguucggcaagggcuccaucgucgccugcgccaaguucacgugcgcgaaguccaugagccuguucgagguggaccagaccaagauccaguacgucauccgcgcccagcuccacgugggggccaagcaggagaacuggaacaccgacaucaagacccugaaguucgacgcccugagcggcagccaggagguggaguucaucggguacggcaaggccacgcucgagugccagguccagaccgcgguggacuucgggaacuccuacaucgccgagauggagaccgagagcuggaucguggaccggcagugggcccaggaccugacccugcccuggcaguccggcagcggcggggucuggcgcgagaugcaccaccucguggaguucgagcccccgcacgccgccacgauccgggugcuggcgcugggcaaccaggaggggucccucaagaccgcccugaccggcgccaugcgcgucaccaaggacacgaacgacaacaaccuguacaagcuccacgggggccacgugagcugccgggugaagcuguccgcccugacccucaagggcaccagcuacaagaucugcaccgacaagauguucuucgucaagaaccccacggacaccgggcacggcaccguggugaugcaggucaagguguccaagggggcgcccugccgcaucccggugaucgucgccgacgaccugaccgccgccaucaacaagggcauccuggugaccgugaacccgaucgccagcacgaacgacgacgagguccucaucgaggugaacccccccuucggcgacuccuacaucaucguggggcggggcgacagccgccugaccuaccaguggcacaaggagggguccagcaucggcagcacccuggggaaggccuucuccaccacgcucaagggcgcccagcgccuggcggcccugggggacaccgccugggacuucggcagcaucgggggcguguucaacuccaucggccgggccguccaccagguguucgggggcgccuuccgcacccucuucgggggcaugagcuggaucacccaggggcugaugggcgcgcugcuccuguggaugggggugaacgcccgggaccgcuccaucgcccuggccuuccucgcgacgggcggcguccugguguuccuggccaccaacgugcacgccugaggacuagugcaucacauuuaaaagcaucucagccuaccaugagaauaagagaaagaaaaugaagaucaauagcuuauucaucucuuuuucuuuuucguugguguaaagccaacacccugucuaaaaaacauaaauuucuuuaaucauuuugccucuuuucucugugcuucaauuaauaaaaaauggaaagaaccuagaucuaaaaaaaaaaaaaaaaaaaaaaaaaaaaaaaaaaaaaaaaaaaaaaaaaaaaaaaaaaaaaaaaugcaucccccccccccccccccccccccccccccccaaaggcucuuuucagagccaccagaauu

SEQ ID NO: 1978 - RNA, 2431 nt, Artificial Sequence
  mRNA product Design i-2 comprising derived and/or modified sequence from YFV__NC_002031.1__SSjev(V3)-prMEdelstem_TM-JEV (polyprotein: aa122-681) (opt1)
ggggcgcugccuacggagguggcagccaucuccuucucggcaucaagcuuaccaugaacgagggcagcaucauguggcuggccucccucgccguggucaucgcgugcgccggggccgugacgcuggugcggaagaaccgcuggcuccugcugaacgucaccuccgaggaccucggcaagaccuucagcguggggaccggcaacugcacgaccaacauccuggaggccaaguacuggugccccgacuccauggaguacaacugcccgaaccugagcccccgggaggagcccgacgacaucgacugcuggugcuacggcguggagaacguccgcguggccuacgggaagugcgacuccgcgggccggagccgccggucccgccgggccaucgaccuccccacccacgagaaccacgggcugaagacccgccaggagaaguggaugacgggccggaugggggagcgccagcugcagaagaucgagcggugguucgugcgcaacccguucuucgccgucaccgcccucaccaucgccuaccuggugggcagcaacaugacccagcggguggucaucgcgcugcucgugcuggccgugggccccgccuacuccgcccacugcaucgggaucacggaccgcgacuucaucgagggcguccacgggggcaccugggugagcgcgacccuggagcaggacaagugcgugaccgucauggcccccgacaagcccucccucgacaucagccuggagacgguggccaucgaccggccggccgaggugcgcaaggucugcuacaacgccgugcugacccacgugaagaucaacgacaagugccccuccaccggcgaggcgcaccucgccgaggagaacgagggggacaacgccugcaagcggaccuacagcgaccggggcugggggaacggcugcgggcuguucggcaagggcuccaucgucgccugcgccaaguucacgugcgcgaaguccaugagccuguucgagguggaccagaccaagauccaguacgucauccgcgcccagcuccacgugggggccaagcaggagaacuggaacaccgacaucaagacccugaaguucgacgcccugagcggcagccaggagguggaguucaucggguacggcaaggccacgcucgagugccagguccagaccgcgguggacuucgggaacuccuacaucgccgagauggagaccgagagcuggaucguggaccggcagugggcccaggaccugacccugcccuggcaguccggcagcggcggggucuggcgcgagaugcaccaccucguggaguucgagcccccgcacgccgccacgauccgggugcuggcgcugggcaaccaggaggggucccucaagaccgcccugaccggcgccaugcgcgucaccaaggacacgaacgacaacaaccuguacaagcuccacgggggccacgugagcugccgggugaagcuguccgcccugacccucaagggcaccagcuacaagaucugcaccgacaagauguucuucgucaagaaccccacggacaccgggcacggcaccguggugaugcaggucaagguguccaagggggcgcccugccgcaucccggugaucgucgccgacgaccugaccgccgccaucaacaagggcauccuggugaccgugaacccgaucgccagcacgaacgacgacgagguccucaucgaggugaacccccccuucggcgacuccuacaucaucguggggcggggcgacagccgccugaccuaccaguggcacaaggagggguccagcaucggcagcacccuggggaaggccuucuccaccacgcucaagggcgcccagcgccuggcggcccugggggacaccgccugggacuucggcagcaucgggggcguguucaacuccaucggccgggccguccaccagguguucgggggcgccuuccgcacccucuucgggggcaugagcuggaucacccaggggcugaugggcgcgcugcuccuguggaugggggugaacgcccgggaccgcuccaucgcccuggccuuccucgcgacgggcggcguccugguguuccuggccaccaacgugcacgccugaggacuagugcaucacauuuaaaagcaucucagccuaccaugagaauaagagaaagaaaaugaagaucaauagcuuauucaucucuuuuucuuuuucguugguguaaagccaacacccugucuaaaaaacauaaauuucuuuaaucauuuugccucuuuucucugugcuucaauuaauaaaaaauggaaagaaccuagaucuaaaaaaaaaaaaaaaaaaaaaaaaaaaaaaaaaaaaaaaaaaaaaaaaaaaaaaaaaaaaaaaaugcaucccccccccccccccccccccccccccccccaaaggcucuuuucagagccaccagaauu

SEQ ID NO: 1979 - RNA, 2446 nt, Artificial Sequence
  mRNA product Design i-2 comprising derived and/or modified sequence from YFV__NC_002031.1__X-SS-prME (polyprotein: aa92-778) (opt1)
ggggcgcugccuacggagguggcagccaucuccuucucggcaucaagcuuaccaugcggggccugagcucccgcaagcggcgcagccacgacgugcucaccguccaguuccugauccuggggaugcuccugaugaccggcggggugacgcuggugcggaagaaccgcuggcuccugcugaacgucaccuccgaggaccucggcaagaccuucagcguggggaccggcaacugcacgaccaacauccuggaggccaaguacuggugccccgacuccauggaguacaacugcccgaaccugagcccccgggaggagcccgacgacaucgacugcuggugcuacggcguggagaacguccgcguggccuacgggaagugcgacuccgcgggccggagccgccggucccgccgggccaucgaccuccccacccacgagaaccacgggcugaagacccgccaggagaaguggaugacgggccggaugggggagcgccagcugcagaagaucgagcggugguucgugcgcaacccguucuucgccgucaccgcccucaccaucgccuaccuggugggcagcaacaugacccagcggguggucaucgcgcugcucgugcuggccgugggccccgccuacuccgcccacugcaucgggaucacggaccgcgacuucaucgagggcguccacgggggcaccugggugagcgcgacccuggagcaggacaagugcgugaccgucauggcccccgacaagcccucccucgacaucagccuggagacgguggccaucgaccggccggccgaggugcgcaaggucugcuacaacgccgugcugacccacgugaagaucaacgacaagugccccuccaccggcgaggcgcaccucgccgaggagaacgagggggacaacgccugcaagcggaccuacagcgaccggggcugggggaacggcugcgggcuguucggcaagggcuccaucgucgccugcgccaaguucacgugcgcgaaguccaugagccuguucgagguggaccagaccaagauccaguacgucauccgcgcccagcuccacgugggggccaagcaggagaacuggaacaccgacaucaagacccugaaguucgacgcccugagcggcagccaggagguggaguucaucggguacggcaaggccacgcucgagugccagguccagaccgcgguggacuucgggaacuccuacaucgccgagauggagaccgagagcuggaucguggaccggcagugggcccaggaccugacccugcccuggcaguccggcagcggcggggucuggcgcgagaugcaccaccucguggaguucgagcccccgcacgccgccacgauccgggugcuggcgcugggcaaccaggaggggucccucaagaccgcccugaccggcgccaugcgcgucaccaaggacacgaacgacaacaaccuguacaagcuccacgggggccacgugagcugccgggugaagcuguccgcccugacccucaagggcaccagcuacaagaucugcaccgacaagauguucuucgucaagaaccccacggacaccgggcacggcaccguggugaugcaggucaagguguccaagggggcgcccugccgcaucccggugaucgucgccgacgaccugaccgccgccaucaacaagggcauccuggugaccgugaacccgaucgccagcacgaacgacgacgagguccucaucgaggugaacccccccuucggcgacuccuacaucaucguggggcggggcgacagccgccugaccuaccaguggcacaaggagggguccagcaucggcaagcuguucacccagaccaugaagggggucgagcggcuggcggugaugggcgacacggccugggacuucuccagcgccggcggguucuucaccuccgugggcaaggggauccacaccgucuucggcagcgccuuccaggggcuguucggcggccucaacuggaucaccaaggugaucaugggggccgugcugaucugggucggcaucaacacgcgcaacaugaccauguccaugagcaugauccucgugggggugaucaugauguuccugagccugggcgucggggcgugaggacuagugcaucacauuuaaaagcaucucagccuaccaugagaauaagagaaagaaaaugaagaucaauagcuuauucaucucuuuuucuuuuucguugguguaaagccaacacccugucuaaaaaacauaaauuucuuuaaucauuuugccucuuuucucugugcuucaauuaauaaaaaauggaaagaaccuagaucuaaaaaaaaaaaaaaaaaaaaaaaaaaaaaaaaaaaaaaaaaaaaaaaaaaaaaaaaaaaaaaaaugcaucccccccccccccccccccccccccccccccaaaggcucuuuucagagccaccagaauu

SEQ ID NO: 1980 - RNA, 2449 nt, Artificial Sequence
  mRNA product Design i-2 comprising derived and/or modified sequence from YFV__NC_002031.1__SSjev(V3)-prME-XX (polyprotein: aa122-788) (opt1)
ggggcgcugccuacggagguggcagccaucuccuucucggcaucaagcuuaccaugaacgagggcagcaucauguggcuggccucccucgccguggucaucgcgugcgccggggccgugacgcuggugcggaagaaccgcuggcuccugcugaacgucaccuccgaggaccucggcaagaccuucagcguggggaccggcaacugcacgaccaacauccuggaggccaaguacuggugccccgacuccauggaguacaacugcccgaaccugagcccccgggaggagcccgacgacaucgacugcuggugcuacggcguggagaacguccgcguggccuacgggaagugcgacuccgcgggccggagccgccggucccgccgggccaucgaccuccccacccacgagaaccacgggcugaagacccgccaggagaaguggaugacgggccggaugggggagcgccagcugcagaagaucgagcggugguucgugcgcaacccguucuucgccgucaccgcccucaccaucgccuaccuggugggcagcaacaugacccagcggguggucaucgcgcugcucgugcuggccgugggccccgccuacuccgcccacugcaucgggaucacggaccgcgacuucaucgagggcguccacgggggcaccugggugagcgcgacccuggagcaggacaagugcgugaccgucauggcccccgacaagcccucccucgacaucagccuggagacgguggccaucgaccggccggccgaggugcgcaaggucugcuacaacgccgugcugacccacgugaagaucaacgacaagugccccuccaccggcgaggcgcaccucgccgaggagaacgagggggacaacgccugcaagcggaccuacagcgaccggggcugggggaacggcugcgggcuguucggcaagggcuccaucgucgccugcgccaaguucacgugcgcgaaguccaugagccuguucgagguggaccagaccaagauccaguacgucauccgcgcccagcuccacgugggggccaagcaggagaacuggaacaccgacaucaagacccugaaguucgacgcccugagcggcagccaggagguggaguucaucggguacggcaaggccacgcucgagugccagguccagaccgcgguggacuucgggaacuccuacaucgccgagauggagaccgagagcuggaucguggaccggcagugggcccaggaccugacccugcccuggcaguccggcagcggcggggucuggcgcgagaugcaccaccucguggaguucgagcccccgcacgccgccacgauccgggugcuggcgcugggcaaccaggaggggucccucaagaccgcccugaccggcgccaugcgcgucaccaaggacacgaacgacaacaaccuguacaagcuccacgggggccacgugagcugccgggugaagcuguccgcccugacccucaagggcaccagcuacaagaucugcaccgacaagauguucuucgucaagaaccccacggacaccgggcacggcaccguggugaugcaggucaagguguccaagggggcgcccugccgcaucccggugaucgucgccgacgaccugaccgccgccaucaacaagggcauccuggugaccgugaacccgaucgccagcacgaacgacgacgagguccucaucgaggugaacccccccuucggcgacuccuacaucaucguggggcggggcgacagccgccugaccuaccaguggcacaaggagggguccagcaucggcaagcuguucacccagaccaugaagggggucgagcggcuggcggugaugggcgacacggccugggacuucuccagcgccggcggguucuucaccuccgugggcaaggggauccacaccgucuucggcagcgccuuccaggggcuguucggcggccucaacuggaucaccaaggugaucaugggggccgugcugaucugggucggcaucaacacgcgcaacaugaccauguccaugagcaugauccucgugggggugaucaugauguuccugagccugggcgucggggcggaccagggcugcgccaucaacuucggcaagugaggacuagugcaucacauuuaaaagcaucucagccuaccaugagaauaagagaaagaaaaugaagaucaauagcuuauucaucucuuuuucuuuuucguugguguaaagccaacacccugucuaaaaaacauaaauuucuuuaaucauuuugccucuuuucucugugcuucaauuaauaaaaaauggaaagaaccuagaucuaaaaaaaaaaaaaaaaaaaaaaaaaaaaaaaaaaaaaaaaaaaaaaaaaaaaaaaaaaaaaaaaugcaucccccccccccccccccccccccccccccccaaaggcucuuuucagagccaccagaauu

SEQ ID NO: 1981 - RNA, 2458 nt, Artificial Sequence
  mRNA product Design i-2 comprising derived and/or modified sequence from YFV__NC_002031.1__X-SS-prMEdelstem_TM-JEV (polyprotein: aa92-681) (opt1)
ggggcgcugccuacggagguggcagccaucuccuucucggcaucaagcuuaccaugcggggccugagcucccgcaagcggcgcagccacgacgugcucaccguccaguuccugauccuggggaugcuccugaugaccggcggggugacgcuggugcggaagaaccgcuggcuccugcugaacgucaccuccgaggaccucggcaagaccuucagcguggggaccggcaacugcacgaccaacauccuggaggccaaguacuggugccccgacuccauggaguacaacugccccaaccugagcccccgggaggagcccgacgacaucgacugcuggugcuacggcguggagaacguccgcguggccuacgggaagugcgacuccgcgggccggagccgccggucccgccgggccaucgaccuccccacccacgagaaccacgggcugaagacccgccaggagaaguggaugacgggccggaugggggagcgccagcugcagaagaucgagcggugguucgugcgcaacccguucuucgccgucaccgcccucaccaucgccuaccuggugggcagcaacaugacccagcggguggucaucgcgcugcucgugcuggccgugggccccgccuacuccgcccacugcaucgggaucacggaccgcgacuucaucgagggcguccacgggggcaccugggugagcgcgacccuggagcaggacaagugcgugaccgucauggcccccgacaagcccucccucgacaucagccuggagacgguggccaucgaccggccggccgaggugcgcaaggucugcuacaacgccgugcugacccacgugaagaucaacgacaagugccccuccaccggcgaggcgcaccucgccgaggagaacgagggggacaacgccugcaagcggaccuacagcgaccggggcugggggaacggcugcgggcuguucggcaagggcuccaucgucgccugcgccaaguucacgugcgcgaaguccaugagccuguucgagguggaccagaccaagauccaguacgucauccgcgcccagcuccacgugggggccaagcaggagaacuggaacaccgacaucaagacccugaaguucgacgcccugagcggcagccaggagguggaguucaucggguacggcaaggccacgcucgagugccagguccagaccgcgguggacuucgggaacuccuacaucgccgagauggagaccgagagcuggaucguggaccggcagugggcccaggaccugacccugcccuggcaguccggcagcggcggggucuggcgcgagaugcaccaccucguggaguucgagcccccgcacgccgccacgauccgggugcuggcgcugggcaaccaggaggggucccucaagaccgcccugaccggcgccaugcgcgucaccaaggacacgaacgacaacaaccuguacaagcuccacgggggccacgugagcugccgggugaagcuguccgcccugacccucaagggcaccagcuacaagaucugcaccgacaagauguucuucgucaagaaccccacggacaccgggcacggcaccguggugaugcaggucaagguguccaagggggcgcccugccgcaucccggugaucgucgccgacgaccugaccgccgccaucaacaagggcauccuggugaccgugaacccgaucgccagcacgaacgacgacgagguccucaucgaggugaacccgcccuucggcgacuccuacaucaucguggggcggggcgacagccgccugaccuaccaguggcacaaggagggguccagcaucggaagcacgcugggcaaggccuuuucaacaacuuugaagggagcucaaagacuggcagcguugggcgacacagccugggacuuuggcucuauuggaggggucuucaacuccauagguagagccguucaccaaguguuuggaggugccuucagaacacucuuugggggaaugucuuggaucacacaagggcuaaugggugcccuacugcucuggaugggcgucaacgcacgagaccgaucaauugcuuuggccuucuuagccacaggaggugugcucguguucuuagcgaccaaugugcacgccugaggacuagugcaucacauuuaaaagcaucucagccuaccaugagaauaagagaaagaaaaugaagaucaauagcuuauucaucucuuuuucuuuuucguugguguaaagccaacacccugucuaaaaaacauaaauuucuuuaaucauuuugccucuuuucucugugcuucaauuaauaaaaaauggaaagaaccuagaucuaaaaaaaaaaaaaaaaaaaaaaaaaaaaaaaaaaaaaaaaaaaaaaaaaaaaaaaaaaaaaaaaugcaucccccccccccccccccccccccccccccccaaaggcucuuuucagagccaccagaauu

SEQ ID NO: 1982 - RNA, 2431 nt, Artificial Sequence
  mRNA product Design i-2 comprising derived and/or modified sequence from YFV__NC_002031.1__SSjev(V3)-prMEdelstem_TM-JEV (polyprotein: aa122-681) (opt1)
ggggcgcugccuacggagguggcagccaucuccuucucggcaucaagcuuaccaugaacgagggcagcaucauguggcuggccucccucgccguggucaucgcgugcgccggggccgugacgcuggugcggaagaaccgcuggcuccugcugaacgucaccuccgaggaccucggcaagaccuucagcguggggaccggcaacugcacgaccaacauccuggaggccaaguacuggugccccgacuccauggaguacaacugccccaaccugagcccccgggaggagcccgacgacaucgacugcuggugcuacggcguggagaacguccgcguggccuacgggaagugcgacuccgcgggccggagccgccggucccgccgggccaucgaccuccccacccacgagaaccacgggcugaagacccgccaggagaaguggaugacgggccggaugggggagcgccagcugcagaagaucgagcggugguucgugcgcaacccguucuucgccgucaccgcccucaccaucgccuaccuggugggcagcaacaugacccagcggguggucaucgcgcugcucgugcuggccgugggccccgccuacuccgcccacugcaucgggaucacggaccgcgacuucaucgagggcguccacgggggcaccugggugagcgcgacccuggagcaggacaagugcgugaccgucauggcccccgacaagcccucccucgacaucagccuggagacgguggccaucgaccggccggccgaggugcgcaaggucugcuacaacgccgugcugacccacgugaagaucaacgacaagugccccuccaccggcgaggcgcaccucgccgaggagaacgagggggacaacgccugcaagcggaccuacagcgaccggggcugggggaacggcugcgggcuguucggcaagggcuccaucgucgccugcgccaaguucacgugcgcgaaguccaugagccuguucgagguggaccagaccaagauccaguacgucauccgcgcccagcuccacgugggggccaagcaggagaacuggaacaccgacaucaagacccugaaguucgacgcccugagcggcagccaggagguggaguucaucggguacggcaaggccacgcucgagugccagguccagaccgcgguggacuucgggaacuccuacaucgccgagauggagaccgagagcuggaucguggaccggcagugggcccaggaccugacccugcccuggcaguccggcagcggcggggucuggcgcgagaugcaccaccucguggaguucgagcccccgcacgccgccacgauccgggugcuggcgcugggcaaccaggaggggucccucaagaccgcccugaccggcgccaugcgcgucaccaaggacacgaacgacaacaaccuguacaagcuccacgggggccacgugagcugccgggugaagcuguccgcccugacccucaagggcaccagcuacaagaucugcaccgacaagauguucuucgucaagaaccccacggacaccgggcacggcaccguggugaugcaggucaagguguccaagggggcgcccugccgcaucccggugaucgucgccgacgaccugaccgccgccaucaacaagggcauccuggugaccgugaacccgaucgccagcacgaacgacgacgagguccucaucgaggugaacccgcccuucggcgacuccuacaucaucguggggcggggcgacagccgccugaccuaccaguggcacaaggagggguccagcaucggcagcacccuggggaaggccuucuccaccacgcucaagggcgcccagcgccuggcggcccugggggacaccgccugggacuucggcagcaucgggggcguguucaacuccaucggccgggccguccaccagguguucgggggcgccuuccgcacccucuucgggggcaugagcuggaucacccaggggcugaugggcgcgcugcuccuguggaugggggugaacgcccgggaccgcuccaucgcccuggccuuccucgcgacgggcggcguccugguguuccuggccaccaacgugcacgccugaggacuagugcaucacauuuaaaagcaucucagccuaccaugagaauaagagaaagaaaaugaagaucaauagcuuauucaucucuuuuucuuuuucguugguguaaagccaacacccugucuaaaaaacauaaauuucuuuaaucauuuugccucuuuucucugugcuucaauuaauaaaaaauggaaagaaccuagaucuaaaaaaaaaaaaaaaaaaaaaaaaaaaaaaaaaaaaaaaaaaaaaaaaaaaaaaaaaaaaaaaaugcaucccccccccccccccccccccccccccccccaaaggcucuuuucagagccaccagaauu

SEQ ID NO: 1983 - RNA, 2446 nt, Artificial Sequence
  mRNA product Design i-2 comprising derived and/or modified sequence from YFV__NC_002031.1__X-SS-prME (polyprotein: aa92-778) (opt1)
ggggcgcugccuacggagguggcagccaucuccuucucggcaucaagcuuaccaugcggggccugagcucccgcaagcggcgcagccacgacgugcucaccguccaguuccugauccuggggaugcuccugaugaccggcggggugacgcuggugcggaagaaccgcuggcuccugcugaacgucaccuccgaggaccucggcaagaccuucagcguggggaccggcaacugcacgaccaacauccuggaggccaaguacuggugccccgacuccauggaguacaacugccccaaccugagcccccgggaggagcccgacgacaucgacugcuggugcuacggcguggagaacguccgcguggccuacgggaagugcgacuccgcgggccggagccgccggucccgccgggccaucgaccuccccacccacgagaaccacgggcugaagacccgccaggagaaguggaugacgggccggaugggggagcgccagcugcagaagaucgagcggugguucgugcgcaacccguucuucgccgucaccgcccucaccaucgccuaccuggugggcagcaacaugacccagcggguggucaucgcgcugcucgugcuggccgugggccccgccuacuccgcccacugcaucgggaucacggaccgcgacuucaucgagggcguccacgggggcaccugggugagcgcgacccuggagcaggacaagugcgugaccgucauggcccccgacaagcccucccucgacaucagccuggagacgguggccaucgaccggccggccgaggugcgcaaggucugcuacaacgccgugcugacccacgugaagaucaacgacaagugccccuccaccggcgaggcgcaccucgccgaggagaacgagggggacaacgccugcaagcggaccuacagcgaccggggcugggggaacggcugcgggcuguucggcaagggcuccaucgucgccugcgccaaguucacgugcgcgaaguccaugagccuguucgagguggaccagaccaagauccaguacgucauccgcgcccagcuccacgugggggccaagcaggagaacuggaacaccgacaucaagacccugaaguucgacgcccugagcggcagccaggagguggaguucaucggguacggcaaggccacgcucgagugccagguccagaccgcgguggacuucgggaacuccuacaucgccgagauggagaccgagagcuggaucguggaccggcagugggcccaggaccugacccugcccuggcaguccggcagcggcggggucuggcgcgagaugcaccaccucguggaguucgagcccccgcacgccgccacgauccgggugcuggcgcugggcaaccaggaggggucccucaagaccgcccugaccggcgccaugcgcgucaccaaggacacgaacgacaacaaccuguacaagcuccacgggggccacgugagcugccgggugaagcuguccgcccugacccucaagggcaccagcuacaagaucugcaccgacaagauguucuucgucaagaaccccacggacaccgggcacggcaccguggugaugcaggucaagguguccaagggggcgcccugccgcaucccggugaucgucgccgacgaccugaccgccgccaucaacaagggcauccuggugaccgugaacccgaucgccagcacgaacgacgacgagguccucaucgaggugaacccgcccuucggcgacuccuacaucaucguggggcggggcgacagccgccugaccuaccaguggcacaaggagggguccagcaucggcaagcuguucacccagaccaugaagggggucgagcggcuggcggugaugggcgacacggccugggacuucuccagcgccggcggguucuucaccuccgugggcaaggggauccacaccgucuucggcagcgccuuccaggggcuguucggcggccucaacuggaucaccaaggugaucaugggggccgugcugaucugggucggcaucaacacgcgcaacaugaccauguccaugagcaugauccucgugggggugaucaugauguuccugagccugggcgucggggcgugaggacuagugcaucacauuuaaaagcaucucagccuaccaugagaauaagagaaagaaaaugaagaucaauagcuuauucaucucuuuuucuuuuucguugguguaaagccaacacccugucuaaaaaacauaaauuucuuuaaucauuuugccucuuuucucugugcuucaauuaauaaaaaauggaaagaaccuagaucuaaaaaaaaaaaaaaaaaaaaaaaaaaaaaaaaaaaaaaaaaaaaaaaaaaaaaaaaaaaaaaaaugcaucccccccccccccccccccccccccccccccaaaggcucuuuucagagccaccagaauu

SEQ ID NO: 1984 - RNA, 2449 nt, Artificial Sequence
  mRNA product Design i-2 comprising derived and/or modified sequence from YFV__NC_002031.1__SSjev(V3)-prME-XX (polyprotein: aa122-788) (opt1)
ggggcgcugccuacggagguggcagccaucuccuucucggcaucaagcuuaccaugaacgagggcagcaucauguggcuggccucccucgccguggucaucgcgugcgccggggccgugacgcuggugcggaagaaccgcuggcuccugcugaacgucaccuccgaggaccucggcaagaccuucagcguggggaccggcaacugcacgaccaacauccuggaggccaaguacuggugccccgacuccauggaguacaacugccccaaccugagcccccgggaggagcccgacgacaucgacugcuggugcuacggcguggagaacguccgcguggccuacgggaagugcgacuccgcgggccggagccgccggucccgccgggccaucgaccuccccacccacgagaaccacgggcugaagacccgccaggagaaguggaugacgggccggaugggggagcgccagcugcagaagaucgagcggugguucgugcgcaacccguucuucgccgucaccgcccucaccaucgccuaccuggugggcagcaacaugacccagcggguggucaucgcgcugcucgugcuggccgugggccccgccuacuccgcccacugcaucgggaucacggaccgcgacuucaucgagggcguccacgggggcaccugggugagcgcgacccuggagcaggacaagugcgugaccgucauggcccccgacaagcccucccucgacaucagccuggagacgguggccaucgaccggccggccgaggugcgcaaggucugcuacaacgccgugcugacccacgugaagaucaacgacaagugccccuccaccggcgaggcgcaccucgccgaggagaacgagggggacaacgccugcaagcggaccuacagcgaccggggcugggggaacggcugcgggcuguucggcaagggcuccaucgucgccugcgccaaguucacgugcgcgaaguccaugagccuguucgagguggaccagaccaagauccaguacgucauccgcgcccagcuccacgugggggccaagcaggagaacuggaacaccgacaucaagacccugaaguucgacgcccugagcggcagccaggagguggaguucaucggguacggcaaggccacgcucgagugccagguccagaccgcgguggacuucgggaacuccuacaucgccgagauggagaccgagagcuggaucguggaccggcagugggcccaggaccugacccugcccuggcaguccggcagcggcggggucuggcgcgagaugcaccaccucguggaguucgagcccccgcacgccgccacgauccgggugcuggcgcugggcaaccaggaggggucccucaagaccgcccugaccggcgccaugcgcgucaccaaggacacgaacgacaacaaccuguacaagcuccacgggggccacgugagcugccgggugaagcuguccgcccugacccucaagggcaccagcuacaagaucugcaccgacaagauguucuucgucaagaaccccacggacaccgggcacggcaccguggugaugcaggucaagguguccaagggggcgcccugccgcaucccggugaucgucgccgacgaccugaccgccgccaucaacaagggcauccuggugaccgugaacccgaucgccagcacgaacgacgacgagguccucaucgaggugaacccgcccuucggcgacuccuacaucaucguggggcggggcgacagccgccugaccuaccaguggcacaaggagggguccagcaucggcaagcuguucacccagaccaugaagggggucgagcggcuggcggugaugggcgacacggccugggacuucuccagcgccggcggguucuucaccuccgugggcaaggggauccacaccgucuucggcagcgccuuccaggggcuguucggcggccucaacuggaucaccaaggugaucaugggggccgugcugaucugggucggcaucaacacgcgcaacaugaccauguccaugagcaugauccucgugggggugaucaugauguuccugagccugggcgucggggcggaccagggcugcgccaucaacuucggcaagugaggacuagugcaucacauuuaaaagcaucucagccuaccaugagaauaagagaaagaaaaugaagaucaauagcuuauucaucucuuuuucuuuuucguugguguaaagccaacacccugucuaaaaaacauaaauuucuuuaaucauuuugccucuuuucucugugcuucaauuaauaaaaaauggaaagaaccuagaucuaaaaaaaaaaaaaaaaaaaaaaaaaaaaaaaaaaaaaaaaaaaaaaaaaaaaaaaaaaaaaaaaugcaucccccccccccccccccccccccccccccccaaaggcucuuuucagagccaccagaauu

SEQ ID NO: 1985 - RNA, 2458 nt, Artificial Sequence
  mRNA product Design i-2 comprising derived and/or modified sequence from YFV__NC_002031.1__X-SS-prMEdelstem_TM-JEV (polyprotein: aa92-681) (opt2)
ggggcgcugccuacggagguggcagccaucuccuucucggcaucaagcuuaccaugcgcggccucuccucccgcaagcgccgcucccacgacguccucaccguccaguuccucauccucggcaugcuccucaugaccggcggcgucacccucguccgcaagaaccgcuggcuccuccucaacgucaccuccgaggaccucggcaagaccuucuccgucggcaccggcaacugcaccaccaacauccucgaggccaaguacuggugccccgacuccauggaguacaacugccccaaccucuccccccgcgaggagcccgacgacaucgacugcuggugcuacggcgucgagaacguccgcgucgccuacggcaagugcgacuccgccggccgcucccgccgcucccgccgcgccaucgaccuccccacccacgagaaccacggccucaagacccgccaggagaaguggaugaccggccgcaugggcgagcgccagcuccagaagaucgagcgcugguucguccgcaaccccuucuucgccgucaccgcccucaccaucgccuaccucgucggcuccaacaugacccagcgcgucgucaucgcccuccucguccucgccgucggccccgccuacuccgcccacugcaucggcaucaccgaccgcgacuucaucgagggcguccacggcggcaccugggucuccgccacccucgagcaggacaagugcgucaccgucauggcccccgacaagcccucccucgacaucucccucgagaccgucgccaucgaccgccccgccgagguccgcaaggucugcuacaacgccguccucacccacgucaagaucaacgacaagugccccuccaccggcgaggcccaccucgccgaggagaacgagggcgacaacgccugcaagcgcaccuacuccgaccgcggcuggggcaacggcugcggccucuucggcaagggcuccaucgucgccugcgccaaguucaccugcgccaaguccaugucccucuucgaggucgaccagaccaagauccaguacgucauccgcgcccagcuccacgucggcgccaagcaggagaacuggaacaccgacaucaagacccucaaguucgacgcccucuccggcucccaggaggucgaguucaucggcuacggcaaggccacccucgagugccagguccagaccgccgucgacuucggcaacuccuacaucgccgagauggagaccgaguccuggaucgucgaccgccagugggcccaggaccucacccuccccuggcaguccggcuccggcggcgucuggcgcgagaugcaccaccucgucgaguucgagcccccccacgccgccaccauccgcguccucgcccucggcaaccaggagggcucccucaagaccgcccucaccggcgccaugcgcgucaccaaggacaccaacgacaacaaccucuacaagcuccacggcggccacgucuccugccgcgucaagcucuccgcccucacccucaagggcaccuccuacaagaucugcaccgacaagauguucuucgucaagaaccccaccgacaccggccacggcaccgucgucaugcaggucaaggucuccaagggcgcccccugccgcauccccgucaucgucgccgacgaccucaccgccgccaucaacaagggcauccucgucaccgucaaccccaucgccuccaccaacgacgacgagguccucaucgaggucaacccccccuucggcgacuccuacaucaucgucggccgcggcgacucccgccucaccuaccaguggcacaaggagggcuccuccaucggcuccacccucggcaaggccuucuccaccacccucaagggcgcccagcgccucgccgcccucggcgacaccgccugggacuucggcuccaucggcggcgucuucaacuccaucggccgcgccguccaccaggucuucggcggcgccuuccgcacccucuucggcggcauguccuggaucacccagggccucaugggcgcccuccuccucuggaugggcgucaacgcccgcgaccgcuccaucgcccucgccuuccucgccaccggcggcguccucgucuuccucgccaccaacguccacgccugaggacuagugcaucacauuuaaaagcaucucagccuaccaugagaauaagagaaagaaaaugaagaucaauagcuuauucaucucuuuuucuuuuucguugguguaaagccaacacccugucuaaaaaacauaaauuucuuuaaucauuuugccucuuuucucugugcuucaauuaauaaaaaauggaaagaaccuagaucuaaaaaaaaaaaaaaaaaaaaaaaaaaaaaaaaaaaaaaaaaaaaaaaaaaaaaaaaaaaaaaaaugcaucccccccccccccccccccccccccccccccaaaggcucuuuucagagccaccagaauu

SEQ ID NO: 1986 - RNA, 2431 nt, Artificial Sequence
  mRNA product Design i-2 comprising derived and/or modified sequence from YFV__NC_002031.1__SSjev(V3)-prMEdelstem_TM-JEV (polyprotein: aa122-681) (opt2)
ggggcgcugccuacggagguggcagccaucuccuucucggcaucaagcuuaccaugaacgagggcuccaucauguggcucgccucccucgccgucgucaucgccugcgccggcgccgucacccucguccgcaagaaccgcuggcuccuccucaacgucaccuccgaggaccucggcaagaccuucuccgucggcaccggcaacugcaccaccaacauccucgaggccaaguacuggugccccgacuccauggaguacaacugccccaaccucuccccccgcgaggagcccgacgacaucgacugcuggugcuacggcgucgagaacguccgcgucgccuacggcaagugcgacuccgccggccgcucccgccgcucccgccgcgccaucgaccuccccacccacgagaaccacggccucaagacccgccaggagaaguggaugaccggccgcaugggcgagcgccagcuccagaagaucgagcgcugguucguccgcaaccccuucuucgccgucaccgcccucaccaucgccuaccucgucggcuccaacaugacccagcgcgucgucaucgcccuccucguccucgccgucggccccgccuacuccgcccacugcaucggcaucaccgaccgcgacuucaucgagggcguccacggcggcaccugggucuccgccacccucgagcaggacaagugcgucaccgucauggcccccgacaagcccucccucgacaucucccucgagaccgucgccaucgaccgccccgccgagguccgcaaggucugcuacaacgccguccucacccacgucaagaucaacgacaagugccccuccaccggcgaggcccaccucgccgaggagaacgagggcgacaacgccugcaagcgcaccuacuccgaccgcggcuggggcaacggcugcggccucuucggcaagggcuccaucgucgccugcgccaaguucaccugcgccaaguccaugucccucuucgaggucgaccagaccaagauccaguacgucauccgcgcccagcuccacgucggcgccaagcaggagaacuggaacaccgacaucaagacccucaaguucgacgcccucuccggcucccaggaggucgaguucaucggcuacggcaaggccacccucgagugccagguccagaccgccgucgacuucggcaacuccuacaucgccgagauggagaccgaguccuggaucgucgaccgccagugggcccaggaccucacccuccccuggcaguccggcuccggcggcgucuggcgcgagaugcaccaccucgucgaguucgagcccccccacgccgccaccauccgcguccucgcccucggcaaccaggagggcucccucaagaccgcccucaccggcgccaugcgcgucaccaaggacaccaacgacaacaaccucuacaagcuccacggcggccacgucuccugccgcgucaagcucuccgcccucacccucaagggcaccuccuacaagaucugcaccgacaagauguucuucgucaagaaccccaccgacaccggccacggcaccgucgucaugcaggucaaggucuccaagggcgcccccugccgcauccccgucaucgucgccgacgaccucaccgccgccaucaacaagggcauccucgucaccgucaaccccaucgccuccaccaacgacgacgagguccucaucgaggucaacccccccuucggcgacuccuacaucaucgucggccgcggcgacucccgccucaccuaccaguggcacaaggagggcuccuccaucggcuccacccucggcaaggccuucuccaccacccucaagggcgcccagcgccucgccgcccucggcgacaccgccugggacuucggcuccaucggcggcgucuucaacuccaucggccgcgccguccaccaggucuucggcggcgccuuccgcacccucuucggcggcauguccuggaucacccagggccucaugggcgcccuccuccucuggaugggcgucaacgcccgcgaccgcuccaucgcccucgccuuccucgccaccggcggcguccucgucuuccucgccaccaacguccacgccugaggacuagugcaucacauuuaaaagcaucucagccuaccaugagaauaagagaaagaaaaugaagaucaauagcuuauucaucucuuuuucuuuuucguugguguaaagccaacacccugucuaaaaaacauaaauuucuuuaaucauuuugccucuuuucucugugcuucaauuaauaaaaaauggaaagaaccuagaucuaaaaaaaaaaaaaaaaaaaaaaaaaaaaaaaaaaaaaaaaaaaaaaaaaaaaaaaaaaaaaaaaugcaucccccccccccccccccccccccccccccccaaaggcucuuuucagagccaccagaauu

SEQ ID NO: 1987 - RNA, 2446 nt, Artificial Sequence
  mRNA product Design i-2 comprising derived and/or modified sequence from YFV__NC_002031.1__X-SS-prME (polyprotein: aa92-778) (opt2)
ggggcgcugccuacggagguggcagccaucuccuucucggcaucaagcuuaccaugcgcggccucuccucccgcaagcgccgcucccacgacguccucaccguccaguuccucauccucggcaugcuccucaugaccggcggcgucacccucguccgcaagaaccgcuggcuccuccucaacgucaccuccgaggaccucggcaagaccuucuccgucggcaccggcaacugcaccaccaacauccucgaggccaaguacuggugccccgacuccauggaguacaacugccccaaccucuccccccgcgaggagcccgacgacaucgacugcuggugcuacggcgucgagaacguccgcgucgccuacggcaagugcgacuccgccggccgcucccgccgcucccgccgcgccaucgaccuccccacccacgagaaccacggccucaagacccgccaggagaaguggaugaccggccgcaugggcgagcgccagcuccagaagaucgagcgcugguucguccgcaaccccuucuucgccgucaccgcccucaccaucgccuaccucgucggcuccaacaugacccagcgcgucgucaucgcccuccucguccucgccgucggccccgccuacuccgcccacugcaucggcaucaccgaccgcgacuucaucgagggcguccacggcggcaccugggucuccgccacccucgagcaggacaagugcgucaccgucauggcccccgacaagcccucccucgacaucucccucgagaccgucgccaucgaccgccccgccgagguccgcaaggucugcuacaacgccguccucacccacgucaagaucaacgacaagugccccuccaccggcgaggcccaccucgccgaggagaacgagggcgacaacgccugcaagcgcaccuacuccgaccgcggcuggggcaacggcugcggccucuucggcaagggcuccaucgucgccugcgccaaguucaccugcgccaaguccaugucccucuucgaggucgaccagaccaagauccaguacgucauccgcgcccagcuccacgucggcgccaagcaggagaacuggaacaccgacaucaagacccucaaguucgacgcccucuccggcucccaggaggucgaguucaucggcuacggcaaggccacccucgagugccagguccagaccgccgucgacuucggcaacuccuacaucgccgagauggagaccgaguccuggaucgucgaccgccagugggcccaggaccucacccuccccuggcaguccggcuccggcggcgucuggcgcgagaugcaccaccucgucgaguucgagcccccccacgccgccaccauccgcguccucgcccucggcaaccaggagggcucccucaagaccgcccucaccggcgccaugcgcgucaccaaggacaccaacgacaacaaccucuacaagcuccacggcggccacgucuccugccgcgucaagcucuccgcccucacccucaagggcaccuccuacaagaucugcaccgacaagauguucuucgucaagaaccccaccgacaccggccacggcaccgucgucaugcaggucaaggucuccaagggcgcccccugccgcauccccgucaucgucgccgacgaccucaccgccgccaucaacaagggcauccucgucaccgucaaccccaucgccuccaccaacgacgacgagguccucaucgaggucaacccccccuucggcgacuccuacaucaucgucggccgcggcgacucccgccucaccuaccaguggcacaaggagggcuccuccaucggcaagcucuucacccagaccaugaagggcgucgagcgccucgccgucaugggcgacaccgccugggacuucuccuccgccggcggcuucuucaccuccgucggcaagggcauccacaccgucuucggcuccgccuuccagggccucuucggcggccucaacuggaucaccaaggucaucaugggcgccguccucaucugggucggcaucaacacccgcaacaugaccauguccauguccaugauccucgucggcgucaucaugauguuccucucccucggcgucggcgccugaggacuagugcaucacauuuaaaagcaucucagccuaccaugagaauaagagaaagaaaaugaagaucaauagcuuauucaucucuuuuucuuuuucguugguguaaagccaacacccugucuaaaaaacauaaauuucuuuaaucauuuugccucuuuucucugugcuucaauuaauaaaaaauggaaagaaccuagaucuaaaaaaaaaaaaaaaaaaaaaaaaaaaaaaaaaaaaaaaaaaaaaaaaaaaaaaaaaaaaaaaaugcaucccccccccccccccccccccccccccccccaaaggcucuuuucagagccaccagaauu

SEQ ID NO: 1988 - RNA, 2449 nt, Artificial Sequence
  mRNA product Design i-2 comprising derived and/or modified sequence from YFV__NC_002031.1__SSjev(V3)-prME-XX (polyprotein: aa122-788) (opt2)
ggggcgcugccuacggagguggcagccaucuccuucucggcaucaagcuuaccaugaacgagggcuccaucauguggcucgccucccucgccgucgucaucgccugcgccggcgccgucacccucguccgcaagaaccgcuggcuccuccucaacgucaccuccgaggaccucggcaagaccuucuccgucggcaccggcaacugcaccaccaacauccucgaggccaaguacuggugccccgacuccauggaguacaacugccccaaccucuccccccgcgaggagcccgacgacaucgacugcuggugcuacggcgucgagaacguccgcgucgccuacggcaagugcgacuccgccggccgcucccgccgcucccgccgcgccaucgaccuccccacccacgagaaccacggccucaagacccgccaggagaaguggaugaccggccgcaugggcgagcgccagcuccagaagaucgagcgcugguucguccgcaaccccuucuucgccgucaccgcccucaccaucgccuaccucgucggcuccaacaugacccagcgcgucgucaucgcccuccucguccucgccgucggccccgccuacuccgcccacugcaucggcaucaccgaccgcgacuucaucgagggcguccacggcggcaccugggucuccgccacccucgagcaggacaagugcgucaccgucauggcccccgacaagcccucccucgacaucucccucgagaccgucgccaucgaccgccccgccgagguccgcaaggucugcuacaacgccguccucacccacgucaagaucaacgacaagugccccuccaccggcgaggcccaccucgccgaggagaacgagggcgacaacgccugcaagcgcaccuacuccgaccgcggcuggggcaacggcugcggccucuucggcaagggcuccaucgucgccugcgccaaguucaccugcgccaaguccaugucccucuucgaggucgaccagaccaagauccaguacgucauccgcgcccagcuccacgucggcgccaagcaggagaacuggaacaccgacaucaagacccucaaguucgacgcccucuccggcucccaggaggucgaguucaucggcuacggcaaggccacccucgagugccagguccagaccgccgucgacuucggcaacuccuacaucgccgagauggagaccgaguccuggaucgucgaccgccagugggcccaggaccucacccuccccuggcaguccggcuccggcggcgucuggcgcgagaugcaccaccucgucgaguucgagcccccccacgccgccaccauccgcguccucgcccucggcaaccaggagggcucccucaagaccgcccucaccggcgccaugcgcgucaccaaggacaccaacgacaacaaccucuacaagcuccacggcggccacgucuccugccgcgucaagcucuccgcccucacccucaagggcaccuccuacaagaucugcaccgacaagauguucuucgucaagaaccccaccgacaccggccacggcaccgucgucaugcaggucaaggucuccaagggcgcccccugccgcauccccgucaucgucgccgacgaccucaccgccgccaucaacaagggcauccucgucaccgucaaccccaucgccuccaccaacgacgacgagguccucaucgaggucaacccccccuucggcgacuccuacaucaucgucggccgcggcgacucccgccucaccuaccaguggcacaaggagggcuccuccaucggcaagcucuucacccagaccaugaagggcgucgagcgccucgccgucaugggcgacaccgccugggacuucuccuccgccggcggcuucuucaccuccgucggcaagggcauccacaccgucuucggcuccgccuuccagggccucuucggcggccucaacuggaucaccaaggucaucaugggcgccguccucaucugggucggcaucaacacccgcaacaugaccauguccauguccaugauccucgucggcgucaucaugauguuccucucccucggcgucggcgccgaccagggcugcgccaucaacuucggcaagugaggacuagugcaucacauuuaaaagcaucucagccuaccaugagaauaagagaaagaaaaugaagaucaauagcuuauucaucucuuuuucuuuuucguugguguaaagccaacacccugucuaaaaaacauaaauuucuuuaaucauuuugccucuuuucucugugcuucaauuaauaaaaaauggaaagaaccuagaucuaaaaaaaaaaaaaaaaaaaaaaaaaaaaaaaaaaaaaaaaaaaaaaaaaaaaaaaaaaaaaaaaugcaucccccccccccccccccccccccccccccccaaaggcucuuuucagagccaccagaauu

SEQ ID NO: 1989 - RNA, 2458 nt, Artificial Sequence
  mRNA product Design i-2 comprising derived and/or modified sequence from YFV__NC_002031.1__X-SS-prMEdelstem_TM-JEV (polyprotein: aa92-681) (opt3)
ggggcgcugccuacggagguggcagccaucuccuucucggcaucaagcuuaccaugagaggccugagcuccaggaagcggcgcucucacgacgugcucaccguccaguuccuuauccuggggauguuguuaaugacaggagguguuacucuggugcguaaaaaccgauggcuacuccugaauguaacgucagaggaucuuggcaagaccuuuaguguggggacaggaaacugcacuaccaauauucuggaagccaaauacuggugucccgacagcauggaguauaacugcccuaauuuguccccaagagaggaaccggaugacauagauuguuggugcuacggcgucgaaaacgugaggguugcuuaugguaagugugacucugcagggcggucgcgcagaucaaggcgggccaucgaucuccccacacaugagaaucacggacugaaaacccgccaagagaaguggaugacuggccgaaugggcgaaagacagcugcagaagauugagaggugguucgugcggaacccuuucuucgcggucacagcucucaccaucgccuacuuaguggggagcaauaugacgcagcguguaguuauugcacugcuuguguuggccgucggaccagcuuauagugcacauugcaucgguauaacugaccgcgauuuuaucgaaggcgugcacgggggaaccuggguguccgccacacuggagcaagacaaaugugucacuguuauggcucccgauaagccuucucuagacauuagccucgagaccguggccaucgauagaccagcggaaguaaggaaagugugcuacaacgcaguccugacacaugugaagauuaaugacaaaugucccuccaccggcgaggcccaccuugcugaagagaacgaaggugacaaugccugcaagcggacguauucagaucgaggguggggaaacggcuguggccuguucgggaagggaaguaucguugcaugcgcuaaauuuacuugcgccaagagcaugucuuuguucgagguggaccagacaaaaauacaguacgucauucgcgcgcagcuccacgugggugccaagcaagagaauuggaacaccgauaucaaaacucugaaguuugacgcauuauccggcucacaggaaguagaguucauuggguacggaaaagcuacacuggaaugucagguucagaccgccguggauuuuggcaacagcuauaucgcugagauggaaacggagaguuggaucgucgacagacaaugggcccaggaucucacccuuccuuggcagucugguuccgggggcguguggagggagaugcaucaccuggucgaauuugagccaccgcaugcagccacaauucggguguuggcucuaggaaaucaagaaggcagccugaagacugcgcucaccggggcaaugcgcguuacaaaggacacuaacgauaauaaccuguacaaacuucacggaggucacgugucgugcagaguaaagcugucugccuugacccucaaaggcacauccuauaagauauguaccgacaaaauguuuuucgucaagaaucccacugauacggggcauggaacagugguuaugcaagugaaggucucaaaaggcgcuccuugcaggaucccagugauuguagccgacgaccugaccgcagccaucaacaaggguauauuagugacuguuaaucccauugcuaguaccaacgaugacgagguccugaucgaagugaauccuccauucggggauagcuacaucauugugggccguggagacucccggcuaacauaucaguggcacaaagagggcucuagcaucggcagcacccuggggaaggccuucuccacaacucucaaaggagcucagagacuugcagcccugggugacacggcgugggauuuuggcucuaucgggggaguguucaacucaauuggcagggcuguccaccaaguuuuugguggggccuuccggaccuuguuuggaggcaugaguuggauaacacagggcuuaaugggggcacugcuacucuggaugggagugaaugcccgcgaccgaagcaucgcucuggcauuccuugccacugguggcguacugguguuuuuggcuaccaacguccaugccugaggacuagugcaucacauuuaaaagcaucucagccuaccaugagaauaagagaaagaaaaugaagaucaauagcuuauucaucucuuuuucuuuuucguugguguaaagccaacacccugucuaaaaaacauaaauuucuuuaaucauuuugccucuuuucucugugcuucaauuaauaaaaaauggaaagaaccuagaucuaaaaaaaaaaaaaaaaaaaaaaaaaaaaaaaaaaaaaaaaaaaaaaaaaaaaaaaaaaaaaaaaugcaucccccccccccccccccccccccccccccccaaaggcucuuuucagagccaccagaauu

SEQ ID NO: 1990 - RNA, 2431 nt, Artificial Sequence
  mRNA product Design i-2 comprising derived and/or modified sequence from YFV__NC_002031.1__SSjev(V3)-prMEdelstem_TM-JEV (polyprotein: aa122-681) (opt3)
ggggcgcugccuacggagguggcagccaucuccuucucggcaucaagcuuaccaugaacgagggcagcaucauguggcuggccucccucgcuguggucauugcaugcgccggggcgguuacucuggugcguaaaaaccgauggcuacuccugaauguaacgucagaggaucuuggcaagaccuuuaguguggggacaggaaacugcacuaccaauauucuggaagccaaauacuggugucccgacagcauggaguauaacugcccuaauuuguccccaagagaggaaccggaugacauagauuguuggugcuacggcgucgaaaacgugaggguugcuuaugguaagugugacucugcagggcggucgcgcagaucaaggcgggccaucgaucuccccacacaugagaaucacggacugaaaacccgccaagagaaguggaugacuggccgaaugggcgaaagacagcugcagaagauugagaggugguucgugcggaacccuuucuucgcggucacagcucucaccaucgccuacuuaguggggagcaauaugacgcagcguguaguuauugcacugcuuguguuggccgucggaccagcuuauagugcacauugcaucgguauaacugaccgcgauuuuaucgaaggcgugcacgggggaaccuggguguccgccacacuggagcaagacaaaugugucacuguuauggcucccgauaagccuucucuagacauuagccucgagaccguggccaucgauagaccagcggaaguaaggaaagugugcuacaacgcaguccugacacaugugaagauuaaugacaaaugucccuccaccggcgaggcccaccuugcugaagagaacgaaggugacaaugccugcaagcggacguauucagaucgaggguggggaaacggcuguggccuguucgggaagggaaguaucguugcaugcgcuaaauuuacuugcgccaagagcaugucuuuguucgagguggaccagacaaaaauacaguacgucauucgcgcgcagcuccacgugggugccaagcaagagaauuggaacaccgauaucaaaacucugaaguuugacgcauuauccggcucacaggaaguagaguucauuggguacggaaaagcuacacuggaaugucagguucagaccgccguggauuuuggcaacagcuauaucgcugagauggaaacggagaguuggaucgucgacagacaaugggcccaggaucucacccuuccuuggcagucugguuccgggggcguguggagggagaugcaucaccuggucgaauuugagccaccgcaugcagccacaauucggguguuggcucuaggaaaucaagaaggcagccugaagacugcgcucaccggggcaaugcgcguuacaaaggacacuaacgauaauaaccuguacaaacuucacggaggucacgugucgugcagaguaaagcugucugccuugacccucaaaggcacauccuauaagauauguaccgacaaaauguuuuucgucaagaaucccacugauacggggcauggaacagugguuaugcaagugaaggucucaaaaggcgcuccuugcaggaucccagugauuguagccgacgaccugaccgcagccaucaacaaggguauauuagugacuguuaaucccauugcuaguaccaacgaugacgagguccugaucgaagugaauccuccauucggggauagcuacaucauugugggccguggagacucccggcuaacauaucaguggcacaaagagggcucuagcaucggcagcacccuggggaaggccuucuccacaacucucaaaggagcucagagacuugcagcccugggugacacggcgugggauuuuggcucuaucgggggaguguucaacucaauuggcagggcuguccaccaaguuuuugguggggccuuccggaccuuguuuggaggcaugaguuggauaacacagggcuuaaugggggcacugcuacucuggaugggagugaaugcccgcgaccgaagcaucgcucuggcauuccuugccacugguggcguacugguguuuuuggcuaccaacguccaugccugaggacuagugcaucacauuuaaaagcaucucagccuaccaugagaauaagagaaagaaaaugaagaucaauagcuuauucaucucuuuuucuuuuucguugguguaaagccaacacccugucuaaaaaacauaaauuucuuuaaucauuuugccucuuuucucugugcuucaauuaauaaaaaauggaaagaaccuagaucuaaaaaaaaaaaaaaaaaaaaaaaaaaaaaaaaaaaaaaaaaaaaaaaaaaaaaaaaaaaaaaaaugcaucccccccccccccccccccccccccccccccaaaggcucuuuucagagccaccagaauu

SEQ ID NO: 1991 - RNA, 2446 nt, Artificial Sequence
  mRNA product Design i-2 comprising derived and/or modified sequence from YFV__NC_002031.1__X-SS-prME (polyprotein: aa92-778) (opt3)
ggggcgcugccuacggagguggcagccaucuccuucucggcaucaagcuuaccaugagaggccugagcuccaggaagcggcgcucucacgacgugcucaccguccaguuccuuauccuggggauguuguuaaugacaggagguguuacucuggugcguaaaaaccgauggcuacuccugaauguaacgucagaggaucuuggcaagaccuuuaguguggggacaggaaacugcacuaccaauauucuggaagccaaauacuggugucccgacagcauggaguauaacugcccuaauuuguccccaagagaggaaccggaugacauagauuguuggugcuacggcgucgaaaacgugaggguugcuuaugguaagugugacucugcagggcggucgcgcagaucaaggcgggccaucgaucuccccacacaugagaaucacggacugaaaacccgccaagagaaguggaugacuggccgaaugggcgaaagacagcugcagaagauugagaggugguucgugcggaacccuuucuucgcggucacagcucucaccaucgccuacuuaguggggagcaauaugacgcagcguguaguuauugcacugcuuguguuggccgucggaccagcuuauagugcacauugcaucgguauaacugaccgcgauuuuaucgaaggcgugcacgggggaaccuggguguccgccacacuggagcaagacaaaugugucacuguuauggcucccgauaagccuucucuagacauuagccucgagaccguggccaucgauagaccagcggaaguaaggaaagugugcuacaacgcaguccugacacaugugaagauuaaugacaaaugucccuccaccggcgaggcccaccuugcugaagagaacgaaggugacaaugccugcaagcggacguauucagaucgaggguggggaaacggcuguggccuguucgggaagggaaguaucguugcaugcgcuaaauuuacuugcgccaagagcaugucuuuguucgagguggaccagacaaaaauacaguacgucauucgcgcgcagcuccacgugggugccaagcaagagaauuggaacaccgauaucaaaacucugaaguuugacgcauuauccggcucacaggaaguagaguucauuggguacggaaaagcuacacuggaaugucagguucagaccgccguggauuuuggcaacagcuauaucgcugagauggaaacggagaguuggaucgucgacagacaaugggcccaggaucucacccuuccuuggcagucugguuccgggggcguguggagggagaugcaucaccuggucgaauuugagccaccgcaugcagccacaauucggguguuggcucuaggaaaucaagaaggcagccugaagacugcgcucaccggggcaaugcgcguuacaaaggacacuaacgauaauaaccuguacaaacuucacggaggucacgugucgugcagaguaaagcugucugccuugacccucaaaggcacauccuauaagauauguaccgacaaaauguuuuucgucaagaaucccacugauacggggcauggaacagugguuaugcaagugaaggucucaaaaggcgcuccuugcaggaucccagugauuguagccgacgaccugaccgcagccaucaacaaggguauauuagugacuguuaaucccauugcuaguaccaacgaugacgagguccugaucgaagugaauccuccauucggggauagcuacaucauugugggccguggagacucccggcuaacauaucaguggcacaaagagggcucuagcaucgggaagcucuuuacccagacuaugaaaggagucgagcgacuggccguuaugggugauacagcaugggacuucucaagugcgggcggguuuuucacguccgugggaaagggcauucauaccguguuugguagcgcuuuccaggggcuuuuuggcggauugaacuggauaacuaagguaaucaugggcgccguccugauuuggguggggaucaauacaagaaacaugaccaugucuaugucaaugauccucguuggagugauuaugauguuccugagucuuggcgucggugcaugaggacuagugcaucacauuuaaaagcaucucagccuaccaugagaauaagagaaagaaaaugaagaucaauagcuuauucaucucuuuuucuuuuucguugguguaaagccaacacccugucuaaaaaacauaaauuucuuuaaucauuuugccucuuuucucugugcuucaauuaauaaaaaauggaaagaaccuagaucuaaaaaaaaaaaaaaaaaaaaaaaaaaaaaaaaaaaaaaaaaaaaaaaaaaaaaaaaaaaaaaaaugcaucccccccccccccccccccccccccccccccaaaggcucuuuucagagccaccagaauu

SEQ ID NO: 1992 - RNA, 2449 nt, Artificial Sequence
  mRNA product Design i-2 comprising derived and/or modified sequence from YFV__NC_002031.1__SSjev(V3)-prME-XX (polyprotein: aa122-788) (opt3)
ggggcgcugccuacggagguggcagccaucuccuucucggcaucaagcuuaccaugaacgagggcagcaucauguggcuggccucccucgcuguggucauugcaugcgccggggcgguuacucuggugcguaaaaaccgauggcuacuccugaauguaacgucagaggaucuuggcaagaccuuuaguguggggacaggaaacugcacuaccaauauucuggaagccaaauacuggugucccgacagcauggaguauaacugcccuaauuuguccccaagagaggaaccggaugacauagauuguuggugcuacggcgucgaaaacgugaggguugcuuaugguaagugugacucugcagggcggucgcgcagaucaaggcgggccaucgaucuccccacacaugagaaucacggacugaaaacccgccaagagaaguggaugacuggccgaaugggcgaaagacagcugcagaagauugagaggugguucgugcggaacccuuucuucgcggucacagcucucaccaucgccuacuuaguggggagcaauaugacgcagcguguaguuauugcacugcuuguguuggccgucggaccagcuuauagugcacauugcaucgguauaacugaccgcgauuuuaucgaaggcgugcacgggggaaccuggguguccgccacacuggagcaagacaaaugugucacuguuauggcucccgauaagccuucucuagacauuagccucgagaccguggccaucgauagaccagcggaaguaaggaaagugugcuacaacgcaguccugacacaugugaagauuaaugacaaaugucccuccaccggcgaggcccaccuugcugaagagaacgaaggugacaaugccugcaagcggacguauucagaucgaggguggggaaacggcuguggccuguucgggaagggaaguaucguugcaugcgcuaaauuuacuugcgccaagagcaugucuuuguucgagguggaccagacaaaaauacaguacgucauucgcgcgcagcuccacgugggugccaagcaagagaauuggaacaccgauaucaaaacucugaaguuugacgcauuauccggcucacaggaaguagaguucauuggguacggaaaagcuacacuggaaugucagguucagaccgccguggauuuuggcaacagcuauaucgcugagauggaaacggagaguuggaucgucgacagacaaugggcccaggaucucacccuuccuuggcagucugguuccgggggcguguggagggagaugcaucaccuggucgaauuugagccaccgcaugcagccacaauucggguguuggcucuaggaaaucaagaaggcagccugaagacugcgcucaccggggcaaugcgcguuacaaaggacacuaacgauaauaaccuguacaaacuucacggaggucacgugucgugcagaguaaagcugucugccuugacccucaaaggcacauccuauaagauauguaccgacaaaauguuuuucgucaagaaucccacugauacggggcauggaacagugguuaugcaagugaaggucucaaaaggcgcuccuugcaggaucccagugauuguagccgacgaccugaccgcagccaucaacaaggguauauuagugacuguuaaucccauugcuaguaccaacgaugacgagguccugaucgaagugaauccuccauucggggauagcuacaucauugugggccguggagacucccggcuaacauaucaguggcacaaagagggcucuagcaucgggaagcucuuuacccagacuaugaaaggagucgagcgacuggccguuaugggugauacagcaugggacuucucaagugcgggcggguuuuucacguccgugggaaagggcauucauaccguguuugguagcgcuuuccaggggcuuuuuggcggauugaacuggauaacuaagguaaucaugggcgccguccugauuuggguggggaucaauacaagaaacaugaccaugucuaugucaaugauccucguuggagugauuaugauguuccugagucuuggcgucggugcagaucaggggugugccauaaauuuuggaaaaugaggacuagugcaucacauuuaaaagcaucucagccuaccaugagaauaagagaaagaaaaugaagaucaauagcuuauucaucucuuuuucuuuuucguugguguaaagccaacacccugucuaaaaaacauaaauuucuuuaaucauuuugccucuuuucucugugcuucaauuaauaaaaaauggaaagaaccuagaucuaaaaaaaaaaaaaaaaaaaaaaaaaaaaaaaaaaaaaaaaaaaaaaaaaaaaaaaaaaaaaaaaugcaucccccccccccccccccccccccccccccccaaaggcucuuuucagagccaccagaauu

SEQ ID NO: 1993 - RNA, 2458 nt, Artificial Sequence
  mRNA product Design i-2 comprising derived and/or modified sequence from YFV__NC_002031.1__X-SS-prMEdelstem_TM-JEV (polyprotein: aa92-681) (opt4)
ggggcgcugccuacggagguggcagccaucuccuucucggcaucaagcuuaccaugagaggccugagcagcagaaagagaagaagccacgacgugcugaccgugcaguuccugauccugggcaugcugcugaugaccggcggcgugacccuggugagaaagaacagauggcugcugcugaacgugaccagcgaggaccugggcaagaccuucagcgugggcaccggcaacugcaccaccaacauccuggaggccaaguacuggugccccgacagcauggaguacaacugccccaaccugagccccagagaggagcccgacgacaucgacugcuggugcuacggcguggagaacgugagaguggccuacggcaagugcgacagcgccggcagaagcagaagaagcagaagagccaucgaccugcccacccacgagaaccacggccugaagaccagacaggagaaguggaugaccggcagaaugggcgagagacagcugcagaagaucgagagaugguucgugagaaaccccuucuucgccgugaccgcccugaccaucgccuaccuggugggcagcaacaugacccagagaguggugaucgcccugcuggugcuggccgugggccccgccuacagcgcccacugcaucggcaucaccgacagagacuucaucgagggcgugcacggcggcaccugggugagcgccacccuggagcaggacaagugcgugaccgugauggcccccgacaagcccagccuggacaucagccuggagaccguggccaucgacagacccgccgaggugagaaaggugugcuacaacgccgugcugacccacgugaagaucaacgacaagugccccagcaccggcgaggcccaccuggccgaggagaacgagggcgacaacgccugcaagagaaccuacagcgacagaggcuggggcaacggcugcggccuguucggcaagggcagcaucguggccugcgccaaguucaccugcgccaagagcaugagccuguucgagguggaccagaccaagauccaguacgugaucagagcccagcugcacgugggcgccaagcaggagaacuggaacaccgacaucaagacccugaaguucgacgcccugagcggcagccaggagguggaguucaucggcuacggcaaggccacccuggagugccaggugcagaccgccguggacuucggcaacagcuacaucgccgagauggagaccgagagcuggaucguggacagacagugggcccaggaccugacccugcccuggcagagcggcagcggcggcguguggagagagaugcaccaccugguggaguucgagcccccccacgccgccaccaucagagugcuggcccugggcaaccaggagggcagccugaagaccgcccugaccggcgccaugagagugaccaaggacaccaacgacaacaaccuguacaagcugcacggcggccacgugagcugcagagugaagcugagcgcccugacccugaagggcaccagcuacaagaucugcaccgacaagauguucuucgugaagaaccccaccgacaccggccacggcaccguggugaugcaggugaaggugagcaagggcgcccccugcagaauccccgugaucguggccgacgaccugaccgccgccaucaacaagggcauccuggugaccgugaaccccaucgccagcaccaacgacgacgaggugcugaucgaggugaacccccccuucggcgacagcuacaucaucgugggcagaggcgacagcagacugaccuaccaguggcacaaggagggcagcagcaucggcagcacccugggcaaggccuucagcaccacccugaagggcgcccagagacuggccgcccugggcgacaccgccugggacuucggcagcaucggcggcguguucaacagcaucggcagagccgugcaccagguguucggcggcgccuucagaacccuguucggcggcaugagcuggaucacccagggccugaugggcgcccugcugcuguggaugggcgugaacgccagagacagaagcaucgcccuggccuuccuggccaccggcggcgugcugguguuccuggccaccaacgugcacgccugaggacuagugcaucacauuuaaaagcaucucagccuaccaugagaauaagagaaagaaaaugaagaucaauagcuuauucaucucuuuuucuuuuucguugguguaaagccaacacccugucuaaaaaacauaaauuucuuuaaucauuuugccucuuuucucugugcuucaauuaauaaaaaauggaaagaaccuagaucuaaaaaaaaaaaaaaaaaaaaaaaaaaaaaaaaaaaaaaaaaaaaaaaaaaaaaaaaaaaaaaaaugcaucccccccccccccccccccccccccccccccaaaggcucuuuucagagccaccagaauu

SEQ ID NO: 1994 - RNA, 2431 nt, Artificial Sequence
  mRNA product Design i-2 comprising derived and/or modified sequence from YFV__NC_002031.1__SSjev(V3)-prMEdelstem_TM-JEV (polyprotein: aa122-681) (opt4)
ggggcgcugccuacggagguggcagccaucuccuucucggcaucaagcuuaccaugaacgagggcagcaucauguggcuggccagccuggccguggugaucgccugcgccggcgccgugacccuggugagaaagaacagauggcugcugcugaacgugaccagcgaggaccugggcaagaccuucagcgugggcaccggcaacugcaccaccaacauccuggaggccaaguacuggugccccgacagcauggaguacaacugccccaaccugagccccagagaggagcccgacgacaucgacugcuggugcuacggcguggagaacgugagaguggccuacggcaagugcgacagcgccggcagaagcagaagaagcagaagagccaucgaccugcccacccacgagaaccacggccugaagaccagacaggagaaguggaugaccggcagaaugggcgagagacagcugcagaagaucgagagaugguucgugagaaaccccuucuucgccgugaccgcccugaccaucgccuaccuggugggcagcaacaugacccagagaguggugaucgcccugcuggugcuggccgugggccccgccuacagcgcccacugcaucggcaucaccgacagagacuucaucgagggcgugcacggcggcaccugggugagcgccacccuggagcaggacaagugcgugaccgugauggcccccgacaagcccagccuggacaucagccuggagaccguggccaucgacagacccgccgaggugagaaaggugugcuacaacgccgugcugacccacgugaagaucaacgacaagugccccagcaccggcgaggcccaccuggccgaggagaacgagggcgacaacgccugcaagagaaccuacagcgacagaggcuggggcaacggcugcggccuguucggcaagggcagcaucguggccugcgccaaguucaccugcgccaagagcaugagccuguucgagguggaccagaccaagauccaguacgugaucagagcccagcugcacgugggcgccaagcaggagaacuggaacaccgacaucaagacccugaaguucgacgcccugagcggcagccaggagguggaguucaucggcuacggcaaggccacccuggagugccaggugcagaccgccguggacuucggcaacagcuacaucgccgagauggagaccgagagcuggaucguggacagacagugggcccaggaccugacccugcccuggcagagcggcagcggcggcguguggagagagaugcaccaccugguggaguucgagcccccccacgccgccaccaucagagugcuggcccugggcaaccaggagggcagccugaagaccgcccugaccggcgccaugagagugaccaaggacaccaacgacaacaaccuguacaagcugcacggcggccacgugagcugcagagugaagcugagcgcccugacccugaagggcaccagcuacaagaucugcaccgacaagauguucuucgugaagaaccccaccgacaccggccacggcaccguggugaugcaggugaaggugagcaagggcgcccccugcagaauccccgugaucguggccgacgaccugaccgccgccaucaacaagggcauccuggugaccgugaaccccaucgccagcaccaacgacgacgaggugcugaucgaggugaacccccccuucggcgacagcuacaucaucgugggcagaggcgacagcagacugaccuaccaguggcacaaggagggcagcagcaucggcagcacccugggcaaggccuucagcaccacccugaagggcgcccagagacuggccgcccugggcgacaccgccugggacuucggcagcaucggcggcguguucaacagcaucggcagagccgugcaccagguguucggcggcgccuucagaacccuguucggcggcaugagcuggaucacccagggccugaugggcgcccugcugcuguggaugggcgugaacgccagagacagaagcaucgcccuggccuuccuggccaccggcggcgugcugguguuccuggccaccaacgugcacgccugaggacuagugcaucacauuuaaaagcaucucagccuaccaugagaauaagagaaagaaaaugaagaucaauagcuuauucaucucuuuuucuuuuucguugguguaaagccaacacccugucuaaaaaacauaaauuucuuuaaucauuuugccucuuuucucugugcuucaauuaauaaaaaauggaaagaaccuagaucuaaaaaaaaaaaaaaaaaaaaaaaaaaaaaaaaaaaaaaaaaaaaaaaaaaaaaaaaaaaaaaaaugcaucccccccccccccccccccccccccccccccaaaggcucuuuucagagccaccagaauu

SEQ ID NO: 1995 - RNA, 2446 nt, Artificial Sequence
  mRNA product Design i-2 comprising derived and/or modified sequence from YFV__NC_002031.1__X-SS-prME (polyprotein: aa92-778) (opt4)
ggggcgcugccuacggagguggcagccaucuccuucucggcaucaagcuuaccaugagaggccugagcagcagaaagagaagaagccacgacgugcugaccgugcaguuccugauccugggcaugcugcugaugaccggcggcgugacccuggugagaaagaacagauggcugcugcugaacgugaccagcgaggaccugggcaagaccuucagcgugggcaccggcaacugcaccaccaacauccuggaggccaaguacuggugccccgacagcauggaguacaacugccccaaccugagccccagagaggagcccgacgacaucgacugcuggugcuacggcguggagaacgugagaguggccuacggcaagugcgacagcgccggcagaagcagaagaagcagaagagccaucgaccugcccacccacgagaaccacggccugaagaccagacaggagaaguggaugaccggcagaaugggcgagagacagcugcagaagaucgagagaugguucgugagaaaccccuucuucgccgugaccgcccugaccaucgccuaccuggugggcagcaacaugacccagagaguggugaucgcccugcuggugcuggccgugggccccgccuacagcgcccacugcaucggcaucaccgacagagacuucaucgagggcgugcacggcggcaccugggugagcgccacccuggagcaggacaagugcgugaccgugauggcccccgacaagcccagccuggacaucagccuggagaccguggccaucgacagacccgccgaggugagaaaggugugcuacaacgccgugcugacccacgugaagaucaacgacaagugccccagcaccggcgaggcccaccuggccgaggagaacgagggcgacaacgccugcaagagaaccuacagcgacagaggcuggggcaacggcugcggccuguucggcaagggcagcaucguggccugcgccaaguucaccugcgccaagagcaugagccuguucgagguggaccagaccaagauccaguacgugaucagagcccagcugcacgugggcgccaagcaggagaacuggaacaccgacaucaagacccugaaguucgacgcccugagcggcagccaggagguggaguucaucggcuacggcaaggccacccuggagugccaggugcagaccgccguggacuucggcaacagcuacaucgccgagauggagaccgagagcuggaucguggacagacagugggcccaggaccugacccugcccuggcagagcggcagcggcggcguguggagagagaugcaccaccugguggaguucgagcccccccacgccgccaccaucagagugcuggcccugggcaaccaggagggcagccugaagaccgcccugaccggcgccaugagagugaccaaggacaccaacgacaacaaccuguacaagcugcacggcggccacgugagcugcagagugaagcugagcgcccugacccugaagggcaccagcuacaagaucugcaccgacaagauguucuucgugaagaaccccaccgacaccggccacggcaccguggugaugcaggugaaggugagcaagggcgcccccugcagaauccccgugaucguggccgacgaccugaccgccgccaucaacaagggcauccuggugaccgugaaccccaucgccagcaccaacgacgacgaggugcugaucgaggugaacccccccuucggcgacagcuacaucaucgugggcagaggcgacagcagacugaccuaccaguggcacaaggagggcagcagcaucggcaagcuguucacccagaccaugaagggcguggagagacuggccgugaugggcgacaccgccugggacuucagcagcgccggcggcuucuucaccagcgugggcaagggcauccacaccguguucggcagcgccuuccagggccuguucggcggccugaacuggaucaccaaggugaucaugggcgccgugcugaucugggugggcaucaacaccagaaacaugaccaugagcaugagcaugauccuggugggcgugaucaugauguuccugagccugggcgugggcgccugaggacuagugcaucacauuuaaaagcaucucagccuaccaugagaauaagagaaagaaaaugaagaucaauagcuuauucaucucuuuuucuuuuucguugguguaaagccaacacccugucuaaaaaacauaaauuucuuuaaucauuuugccucuuuucucugugcuucaauuaauaaaaaauggaaagaaccuagaucuaaaaaaaaaaaaaaaaaaaaaaaaaaaaaaaaaaaaaaaaaaaaaaaaaaaaaaaaaaaaaaaaugcaucccccccccccccccccccccccccccccccaaaggcucuuuucagagccaccagaauu

SEQ ID NO: 1996 - RNA, 2449 nt, Artificial Sequence
  mRNA product Design i-2 comprising derived and/or modified sequence from YFV__NC_002031.1__SSjev(V3)-prME-XX (polyprotein: aa122-788) (opt4)
ggggcgcugccuacggagguggcagccaucuccuucucggcaucaagcuuaccaugaacgagggcagcaucauguggcuggccagccuggccguggugaucgccugcgccggcgccgugacccuggugagaaagaacagauggcugcugcugaacgugaccagcgaggaccugggcaagaccuucagcgugggcaccggcaacugcaccaccaacauccuggaggccaaguacuggugccccgacagcauggaguacaacugccccaaccugagccccagagaggagcccgacgacaucgacugcuggugcuacggcguggagaacgugagaguggccuacggcaagugcgacagcgccggcagaagcagaagaagcagaagagccaucgaccugcccacccacgagaaccacggccugaagaccagacaggagaaguggaugaccggcagaaugggcgagagacagcugcagaagaucgagagaugguucgugagaaaccccuucuucgccgugaccgcccugaccaucgccuaccuggugggcagcaacaugacccagagaguggugaucgcccugcuggugcuggccgugggccccgccuacagcgcccacugcaucggcaucaccgacagagacuucaucgagggcgugcacggcggcaccugggugagcgccacccuggagcaggacaagugcgugaccgugauggcccccgacaagcccagccuggacaucagccuggagaccguggccaucgacagacccgccgaggugagaaaggugugcuacaacgccgugcugacccacgugaagaucaacgacaagugccccagcaccggcgaggcccaccuggccgaggagaacgagggcgacaacgccugcaagagaaccuacagcgacagaggcuggggcaacggcugcggccuguucggcaagggcagcaucguggccugcgccaaguucaccugcgccaagagcaugagccuguucgagguggaccagaccaagauccaguacgugaucagagcccagcugcacgugggcgccaagcaggagaacuggaacaccgacaucaagacccugaaguucgacgcccugagcggcagccaggagguggaguucaucggcuacggcaaggccacccuggagugccaggugcagaccgccguggacuucggcaacagcuacaucgccgagauggagaccgagagcuggaucguggacagacagugggcccaggaccugacccugcccuggcagagcggcagcggcggcguguggagagagaugcaccaccugguggaguucgagcccccccacgccgccaccaucagagugcuggcccugggcaaccaggagggcagccugaagaccgcccugaccggcgccaugagagugaccaaggacaccaacgacaacaaccuguacaagcugcacggcggccacgugagcugcagagugaagcugagcgcccugacccugaagggcaccagcuacaagaucugcaccgacaagauguucuucgugaagaaccccaccgacaccggccacggcaccguggugaugcaggugaaggugagcaagggcgcccccugcagaauccccgugaucguggccgacgaccugaccgccgccaucaacaagggcauccuggugaccgugaaccccaucgccagcaccaacgacgacgaggugcugaucgaggugaacccccccuucggcgacagcuacaucaucgugggcagaggcgacagcagacugaccuaccaguggcacaaggagggcagcagcaucggcaagcuguucacccagaccaugaagggcguggagagacuggccgugaugggcgacaccgccugggacuucagcagcgccggcggcuucuucaccagcgugggcaagggcauccacaccguguucggcagcgccuuccagggccuguucggcggccugaacuggaucaccaaggugaucaugggcgccgugcugaucugggugggcaucaacaccagaaacaugaccaugagcaugagcaugauccuggugggcgugaucaugauguuccugagccugggcgugggcgccgaccagggcugcgccaucaacuucggcaagugaggacuagugcaucacauuuaaaagcaucucagccuaccaugagaauaagagaaagaaaaugaagaucaauagcuuauucaucucuuuuucuuuuucguugguguaaagccaacacccugucuaaaaaacauaaauuucuuuaaucauuuugccucuuuucucugugcuucaauuaauaaaaaauggaaagaaccuagaucuaaaaaaaaaaaaaaaaaaaaaaaaaaaaaaaaaaaaaaaaaaaaaaaaaaaaaaaaaaaaaaaaugcaucccccccccccccccccccccccccccccccaaaggcucuuuucagagccaccagaauu

SEQ ID NO: 1997 - RNA, 2458 nt, Artificial Sequence
  mRNA product Design i-2 comprising derived and/or modified sequence from YFV__NC_002031.1__X-SS-prMEdelstem_TM-JEV (polyprotein: aa92-681) (opt5)
ggggcgcugccuacggagguggcagccaucuccuucucggcaucaagcuuaccaugagaggccugagcucccggaagcgcagaucucacgacgugcucaccguccaguuccugauccuugggaugcugcucaugacaggaggcguuacgcuggugcggaaaaaccgcuggcuucugcucaaugugaccagcgaggaucuggggaagacauuuuccgucggaaccggcaacugcacaaccaauauucuggaagccaaauacuggugucccgacucuauggaguauaacugcccuaaucucagcccgagagaagaacccgaugacaucgauuguuggugcuacgggguggaaaacguucggguggcuuauggaaagugugacuccgccggccgcucuagacggagccgcagagcgauugaucugccuacacaugagaaucacggccuuaaaacccggcaagagaaguggaugacggggcgcaugggagaaagacagcugcagaagaucgagcggugguucguccgcaaccccuuuuucgcugugaccgcccucacaauugccuaccugguuggcuccaauaugacccagagaguggucaucgcccuucuggugcucgcuguggggccugcuuauagcgcccauugcaucggaauuacagaccgggauuuuaucgaaggcguccacgggggaaccuggguuucugcgacgcuggagcaagacaaaugugugacagugauggcccccgauaagccuucccuggacauuagccucgagaccgucgcuaucgauagaccggccgaagugcgcaaaguuugcuacaacgcugugcugacacaugucaagauuaaugacaaaugucccucuaccggcgaggcccaccuugcggaagagaacgaaggcgacaaugccugcaagcggaccuauuccgauagaggguggggaaacggcugugggcuguucggaaagggcagcaucguggcuugcgccaaauuuacaugcgcuaagucuaugucccucuucgagguugaccagacgaaaauucaguacgugauccgcgcccagcugcacgucggggccaagcaagagaauuggaacaccgauaucaaaacacuuaaguuugacgcucugagcggaucccaggaaguggaguucauuggcuacggcaaagcgacccucgaaugucagguccagacagccguggauuuugggaacucuuauaucgcugagauggaaaccgagagcuggauuguugaccggcaaugggcccaggaucugacgcugccuuggcaguccggaagcggcgggguguggagagagaugcaucaccucgucgaguucgagcccccucaugccgcuacaauccgcgugcuggcccuuggaaaucaagaaggcucucugaagaccgcgcucaccggggcuaugcggguuacaaaggacaccaacgauaauaaccuguacaaacuucacggcggacacguguccugcagagucaagcugagcgcccucacacugaaaggcacgucuuauaagauuuguaccgacaaaauguuuuucgugaagaaucccacagauaccgggcauggaacagugguuaugcaggucaaggugagcaaaggcgccccgugccgcaucccugugaucgucgcugacgaccugaccgccgcuauuaacaaggggauccucgugacgguuaaucccauugccuccaccaacgaugacgaggugcugaucgaagucaauccucccuucggagauucuuacauuaucgugggccggggagacagcagacuuacauaucaguggcacaaagagggcuccagcaucggcagcacccuggggaaggccuucuccacaacgcucaaaggagcucagagacuggccgcgcuuggcgacaccgcuugggauuuugggucuaucggaggcguguucaacagcauugggcgggccguccaccaaguuuuuggaggcgccuuccgcacacuguuuggcgggauguccuggaucacccagggacucaugggcgcucugcuucuguggaugggggugaaugccagagaccggucuauugcucucgccuuccuggcgacaggaggcgugcuggucuuucucgccaccaacgugcaugcuugaggacuagugcaucacauuuaaaagcaucucagccuaccaugagaauaagagaaagaaaaugaagaucaauagcuuauucaucucuuuuucuuuuucguugguguaaagccaacacccugucuaaaaaacauaaauuucuuuaaucauuuugccucuuuucucugugcuucaauuaauaaaaaauggaaagaaccuagaucuaaaaaaaaaaaaaaaaaaaaaaaaaaaaaaaaaaaaaaaaaaaaaaaaaaaaaaaaaaaaaaaaugcaucccccccccccccccccccccccccccccccaaaggcucuuuucagagccaccagaauu

SEQ ID NO: 1998 - RNA, 2431 nt, Artificial Sequence
  mRNA product Design i-2 comprising derived and/or modified sequence from YFV__NC_002031.1__SSjev(V3)-prMEdelstem_TM-JEV (polyprotein: aa122-681) (opt5)
ggggcgcugccuacggagguggcagccaucuccuucucggcaucaagcuuaccaugaacgagggcagcaucauguggcuggccucccucgcuguggucauugccugcgcgggggcuguuacgcuggugcggaaaaaccgcuggcuucugcucaaugugaccagcgaggaucuggggaagacauuuuccgucggaaccggcaacugcacaaccaauauucuggaagccaaauacuggugucccgacucuauggaguauaacugcccuaaucucagcccgagagaagaacccgaugacaucgauuguuggugcuacgggguggaaaacguucggguggcuuauggaaagugugacuccgccggccgcucuagacggagccgcagagcgauugaucugccuacacaugagaaucacggccuuaaaacccggcaagagaaguggaugacggggcgcaugggagaaagacagcugcagaagaucgagcggugguucguccgcaaccccuuuuucgcugugaccgcccucacaauugccuaccugguuggcuccaauaugacccagagaguggucaucgcccuucuggugcucgcuguggggccugcuuauagcgcccauugcaucggaauuacagaccgggauuuuaucgaaggcguccacgggggaaccuggguuucugcgacgcuggagcaagacaaaugugugacagugauggcccccgauaagccuucccuggacauuagccucgagaccgucgcuaucgauagaccggccgaagugcgcaaaguuugcuacaacgcugugcugacacaugucaagauuaaugacaaaugucccucuaccggcgaggcccaccuugcggaagagaacgaaggcgacaaugccugcaagcggaccuauuccgauagaggguggggaaacggcugugggcuguucggaaagggcagcaucguggcuugcgccaaauuuacaugcgcuaagucuaugucccucuucgagguugaccagacgaaaauucaguacgugauccgcgcccagcugcacgucggggccaagcaagagaauuggaacaccgauaucaaaacacuuaaguuugacgcucugagcggaucccaggaaguggaguucauuggcuacggcaaagcgacccucgaaugucagguccagacagccguggauuuugggaacucuuauaucgcugagauggaaaccgagagcuggauuguugaccggcaaugggcccaggaucugacgcugccuuggcaguccggaagcggcgggguguggagagagaugcaucaccucgucgaguucgagcccccucaugccgcuacaauccgcgugcuggcccuuggaaaucaagaaggcucucugaagaccgcgcucaccggggcuaugcggguuacaaaggacaccaacgauaauaaccuguacaaacuucacggcggacacguguccugcagagucaagcugagcgcccucacacugaaaggcacgucuuauaagauuuguaccgacaaaauguuuuucgugaagaaucccacagauaccgggcauggaacagugguuaugcaggucaaggugagcaaaggcgccccgugccgcaucccugugaucgucgcugacgaccugaccgccgcuauuaacaaggggauccucgugacgguuaaucccauugccuccaccaacgaugacgaggugcugaucgaagucaauccucccuucggagauucuuacauuaucgugggccggggagacagcagacuuacauaucaguggcacaaagagggcuccagcaucggcagcacccuggggaaggccuucuccacaacgcucaaaggagcucagagacuggccgcgcuuggcgacaccgcuugggauuuugggucuaucggaggcguguucaacagcauugggcgggccguccaccaaguuuuuggaggcgccuuccgcacacuguuuggcgggauguccuggaucacccagggacucaugggcgcucugcuucuguggaugggggugaaugccagagaccggucuauugcucucgccuuccuggcgacaggaggcgugcuggucuuucucgccaccaacgugcaugcuugaggacuagugcaucacauuuaaaagcaucucagccuaccaugagaauaagagaaagaaaaugaagaucaauagcuuauucaucucuuuuucuuuuucguugguguaaagccaacacccugucuaaaaaacauaaauuucuuuaaucauuuugccucuuuucucugugcuucaauuaauaaaaaauggaaagaaccuagaucuaaaaaaaaaaaaaaaaaaaaaaaaaaaaaaaaaaaaaaaaaaaaaaaaaaaaaaaaaaaaaaaaugcaucccccccccccccccccccccccccccccccaaaggcucuuuucagagccaccagaauu

SEQ ID NO: 1999 - RNA, 2446 nt, Artificial Sequence
  mRNA product Design i-2 comprising derived and/or modified sequence from YFV__NC_002031.1__X-SS-prME (polyprotein: aa92-778) (opt5)
ggggcgcugccuacggagguggcagccaucuccuucucggcaucaagcuuaccaugagaggccugagcucccggaagcgcagaucucacgacgugcucaccguccaguuccugauccuugggaugcugcucaugacaggaggcguuacgcuggugcggaaaaaccgcuggcuucugcucaaugugaccagcgaggaucuggggaagacauuuuccgucggaaccggcaacugcacaaccaauauucuggaagccaaauacuggugucccgacucuauggaguauaacugcccuaaucucagcccgagagaagaacccgaugacaucgauuguuggugcuacgggguggaaaacguucggguggcuuauggaaagugugacuccgccggccgcucuagacggagccgcagagcgauugaucugccuacacaugagaaucacggccuuaaaacccggcaagagaaguggaugacggggcgcaugggagaaagacagcugcagaagaucgagcggugguucguccgcaaccccuuuuucgcugugaccgcccucacaauugccuaccugguuggcuccaauaugacccagagaguggucaucgcccuucuggugcucgcuguggggccugcuuauagcgcccauugcaucggaauuacagaccgggauuuuaucgaaggcguccacgggggaaccuggguuucugcgacgcuggagcaagacaaaugugugacagugauggcccccgauaagccuucccuggacauuagccucgagaccgucgcuaucgauagaccggccgaagugcgcaaaguuugcuacaacgcugugcugacacaugucaagauuaaugacaaaugucccucuaccggcgaggcccaccuugcggaagagaacgaaggcgacaaugccugcaagcggaccuauuccgauagaggguggggaaacggcugugggcuguucggaaagggcagcaucguggcuugcgccaaauuuacaugcgcuaagucuaugucccucuucgagguugaccagacgaaaauucaguacgugauccgcgcccagcugcacgucggggccaagcaagagaauuggaacaccgauaucaaaacacuuaaguuugacgcucugagcggaucccaggaaguggaguucauuggcuacggcaaagcgacccucgaaugucagguccagacagccguggauuuugggaacucuuauaucgcugagauggaaaccgagagcuggauuguugaccggcaaugggcccaggaucugacgcugccuuggcaguccggaagcggcgggguguggagagagaugcaucaccucgucgaguucgagcccccucaugccgcuacaauccgcgugcuggcccuuggaaaucaagaaggcucucugaagaccgcgcucaccggggcuaugcggguuacaaaggacaccaacgauaauaaccuguacaaacuucacggcggacacguguccugcagagucaagcugagcgcccucacacugaaaggcacgucuuauaagauuuguaccgacaaaauguuuuucgugaagaaucccacagauaccgggcauggaacagugguuaugcaggucaaggugagcaaaggcgccccgugccgcaucccugugaucgucgcugacgaccugaccgccgcuauuaacaaggggauccucgugacgguuaaucccauugccuccaccaacgaugacgaggugcugaucgaagucaauccucccuucggagauucuuacauuaucgugggccggggagacagcagacuuacauaucaguggcacaaagagggcuccagcaucggaaagcuguuuacccagacaaugaaaggcguugagcgccucgcggugaugggggauaccgccugggacuucucuuccgcuggaggcuuuuucacgagcgucgggaaggggauucauacaguguuuggcucugccuuccaagggcuguuuggcggacugaacuggaucaccaagguuauuaugggcgcugugcuuaucugggucgggauuaauacacggaacaugaccauguccaugagcaugauccucgugggagugauuaugauguuccugucccugggcgucggggccugaggacuagugcaucacauuuaaaagcaucucagccuaccaugagaauaagagaaagaaaaugaagaucaauagcuuauucaucucuuuuucuuuuucguugguguaaagccaacacccugucuaaaaaacauaaauuucuuuaaucauuuugccucuuuucucugugcuucaauuaauaaaaaauggaaagaaccuagaucuaaaaaaaaaaaaaaaaaaaaaaaaaaaaaaaaaaaaaaaaaaaaaaaaaaaaaaaaaaaaaaaaugcaucccccccccccccccccccccccccccccccaaaggcucuuuucagagccaccagaauu

SEQ ID NO: 2000 - RNA, 2449 nt, Artificial Sequence
  mRNA product Design i-2 comprising derived and/or modified sequence from YFV__NC_002031.1__SSjev(V3)-prME-XX (polyprotein: aa122-788) (opt5)
ggggcgcugccuacggagguggcagccaucuccuucucggcaucaagcuuaccaugaacgagggcagcaucauguggcuggccucccucgcuguggucauugccugcgcgggggcuguuacgcuggugcggaaaaaccgcuggcuucugcucaaugugaccagcgaggaucuggggaagacauuuuccgucggaaccggcaacugcacaaccaauauucuggaagccaaauacuggugucccgacucuauggaguauaacugcccuaaucucagcccgagagaagaacccgaugacaucgauuguuggugcuacgggguggaaaacguucggguggcuuauggaaagugugacuccgccggccgcucuagacggagccgcagagcgauugaucugccuacacaugagaaucacggccuuaaaacccggcaagagaaguggaugacggggcgcaugggagaaagacagcugcagaagaucgagcggugguucguccgcaaccccuuuuucgcugugaccgcccucacaauugccuaccugguuggcuccaauaugacccagagaguggucaucgcccuucuggugcucgcuguggggccugcuuauagcgcccauugcaucggaauuacagaccgggauuuuaucgaaggcguccacgggggaaccuggguuucugcgacgcuggagcaagacaaaugugugacagugauggcccccgauaagccuucccuggacauuagccucgagaccgucgcuaucgauagaccggccgaagugcgcaaaguuugcuacaacgcugugcugacacaugucaagauuaaugacaaaugucccucuaccggcgaggcccaccuugcggaagagaacgaaggcgacaaugccugcaagcggaccuauuccgauagaggguggggaaacggcugugggcuguucggaaagggcagcaucguggcuugcgccaaauuuacaugcgcuaagucuaugucccucuucgagguugaccagacgaaaauucaguacgugauccgcgcccagcugcacgucggggccaagcaagagaauuggaacaccgauaucaaaacacuuaaguuugacgcucugagcggaucccaggaaguggaguucauuggcuacggcaaagcgacccucgaaugucagguccagacagccguggauuuugggaacucuuauaucgcugagauggaaaccgagagcuggauuguugaccggcaaugggcccaggaucugacgcugccuuggcaguccggaagcggcgggguguggagagagaugcaucaccucgucgaguucgagcccccucaugccgcuacaauccgcgugcuggcccuuggaaaucaagaaggcucucugaagaccgcgcucaccggggcuaugcggguuacaaaggacaccaacgauaauaaccuguacaaacuucacggcggacacguguccugcagagucaagcugagcgcccucacacugaaaggcacgucuuauaagauuuguaccgacaaaauguuuuucgugaagaaucccacagauaccgggcauggaacagugguuaugcaggucaaggugagcaaaggcgccccgugccgcaucccugugaucgucgcugacgaccugaccgccgcuauuaacaaggggauccucgugacgguuaaucccauugccuccaccaacgaugacgaggugcugaucgaagucaauccucccuucggagauucuuacauuaucgugggccggggagacagcagacuuacauaucaguggcacaaagagggcuccagcaucggaaagcuguuuacccagacaaugaaaggcguugagcgccucgcggugaugggggauaccgccugggacuucucuuccgcuggaggcuuuuucacgagcgucgggaaggggauucauacaguguuuggcucugccuuccaagggcuguuuggcggacugaacuggaucaccaagguuauuaugggcgcugugcuuaucugggucgggauuaauacacggaacaugaccauguccaugagcaugauccucgugggagugauuaugauguuccugucccugggcgucggggccgaucagggaugugcgaucaauuuuggcaaaugaggacuagugcaucacauuuaaaagcaucucagccuaccaugagaauaagagaaagaaaaugaagaucaauagcuuauucaucucuuuuucuuuuucguugguguaaagccaacacccugucuaaaaaacauaaauuucuuuaaucauuuugccucuuuucucugugcuucaauuaauaaaaaauggaaagaaccuagaucuaaaaaaaaaaaaaaaaaaaaaaaaaaaaaaaaaaaaaaaaaaaaaaaaaaaaaaaaaaaaaaaaugcaucccccccccccccccccccccccccccccccaaaggcucuuuucagagccaccagaauu

SEQ ID NO: 2001 - RNA, 2458 nt, Artificial Sequence
  mRNA product Design i-2 comprising derived and/or modified sequence from YFV__NC_002031.1__X-SS-prMEdelstem_TM-JEV (polyprotein: aa92-681) (opt6)
ggggcgcugccuacggagguggcagccaucuccuucucggcaucaagcuuaccaugagaggauuaucaaguagaaaaagaagaucacaugauguacuaaccgugcaauuuuugaucuuagggaugcucuuaaugacaggagguguuacauuaguaagaaagaaucgauggcugcuuuuaaaugugacaucagaggauuuagggaaaacauuuucgguaggaacaggaaauuguacuacaaauauacuugaagcaaaauauuggugcccagacucuauggaauauaauuguccaaauuuaaguccuagagaagaaccugacgauauagauuguugguguuaugguguagaaaauguaagaguagcauacggcaaaugcgauagugcaggacguucuagacguucaaggagagccauagaucugcccacucacgaaaaucacggauugaaaacacgacaagaaaaauggaugacugggcgaaugggagaaagacaacuacagaaaauugaaagaugguucguuagaaauccauucuuugccguaacagcuuuaacaauagccuauuuaguagguaguaauaugacacaaagaguaguaauagcauugcuaguguuagcaguuggaccagcuuauagugcacauugcauaggaauaacagauagagacuuuauagaaggaguacacgggggaacuuggguaagugccacuuuagaacaagauaaauguguuacagugauggcgccagauaaaccaagucuggacauaaguuuggaaacaguagcgauugauagacccgcagaaguaagaaaaguuuguuauaaugcuguucuaacccauguuaaaauaaaugauaaaugcccuagcaccggagaagcccaucuagcagaagaaaaugaaggagauaacgcauguaaacgaacauacucagauagaggauggggcaacggauguggcuuguuuggaaaagguagcauaguagcaugcgcuaaauuuacaugcgcaaagucaaugucauuauuugaaguagaucaaacaaaaauacaauauguaauaagagcucaauuacacgugggugcaaaacaagaaaauuggaauacagacauaaagacacuaaaguucgacgcauuaaguggaucacaagagguagaauuuauaggguacggaaaagcgacuuuagagugucaaguccaaacagcaguagauuucgguaacucauacauagcagaaauggaaacugaaaguuggauaguagauagacaaugggcacaagacuugacacuaccuuggcaaucaggaagcggaggaguauggagagaaaugcaucauuuaguagaauuugaaccaccucaugcagcaacaauaagaguauuagcccuaggaaaccaagaaggaaguuuaaaaacagcacuaacaggagcuaugagaguaacaaaagauacaaaugacaacaaucuauacaaauuacacggaggacauguaagcugccggguaaaguugagcgcacuaacauuaaaaggaacgaguuauaaaauaugcacagauaaaauguucuuuguuaaaaauccuacagauaccggucauggaacaguaguaaugcaaguaaaaguaaguaaaggcgcucccuguagaauaccuguaauagucgcagacgauuuaaccgcagcaauaaauaaaggaauauuagucacgguaaacccaauagcgucaacaaaugaugaugaaguauuaauagaaguuaacccaccuuuuggagacaguuauauaauagucggaaggggugauaguagacuaacauaccaauggcauaaagaaggaagcucaauaggaaguacacuaggaaaagcauuuaguacaacauuaaaaggagcacaaagauuagcagcauuaggagauacagcaugggauuuuggaagcauaggaggaguauuuaauaguauagguagagcaguacaucaaguauuuggaggagcauuuagaacauuauuuggaggaaugaguuggauaacacaaggauuaaugggagcauuauuauuauggaugggaguaaaugcaagagauagaaguauagcauuagcauuuuuagcaacaggaggaguauuaguauuuuuagcaacaaauguacaugcaugaggacuagugcaucacauuuaaaagcaucucagccuaccaugagaauaagagaaagaaaaugaagaucaauagcuuauucaucucuuuuucuuuuucguugguguaaagccaacacccugucuaaaaaacauaaauuucuuuaaucauuuugccucuuuucucugugcuucaauuaauaaaaaauggaaagaaccuagaucuaaaaaaaaaaaaaaaaaaaaaaaaaaaaaaaaaaaaaaaaaaaaaaaaaaaaaaaaaaaaaaaaugcaucccccccccccccccccccccccccccccccaaaggcucuuuucagagccaccagaauu

SEQ ID NO: 2002 - RNA, 2431 nt, Artificial Sequence
  mRNA product Design i-2 comprising derived and/or modified sequence from YFV__NC_002031.1__SSjev(V3)-prMEdelstem_TM-JEV (polyprotein: aa122-681) (opt6)
ggggcgcugccuacggagguggcagccaucuccuucucggcaucaagcuuaccaugaaugaagguucaauuaugugguuggcaucauuagcaguuguaauugcaugugcuggugcaguuacauuaguaagaaagaaucgauggcugcuuuuaaaugugacaucagaggauuuagggaaaacauuuucgguaggaacaggaaauuguacuacaaauauacuugaagcaaaauauuggugcccagacucuauggaauauaauuguccaaauuuaaguccuagagaagaaccugacgauauagauuguugguguuaugguguagaaaauguaagaguagcauacggcaaaugcgauagugcaggacguucuagacguucaaggagagccauagaucugcccacucacgaaaaucacggauugaaaacacgacaagaaaaauggaugacugggcgaaugggagaaagacaacuacagaaaauugaaagaugguucguuagaaauccauucuuugccguaacagcuuuaacaauagccuauuuaguagguaguaauaugacacaaagaguaguaauagcauugcuaguguuagcaguuggaccagcuuauagugcacauugcauaggaauaacagauagagacuuuauagaaggaguacacgggggaacuuggguaagugccacuuuagaacaagauaaauguguuacagugauggcgccagauaaaccaagucuggacauaaguuuggaaacaguagcgauugauagacccgcagaaguaagaaaaguuuguuauaaugcuguucuaacccauguuaaaauaaaugauaaaugcccuagcaccggagaagcccaucuagcagaagaaaaugaaggagauaacgcauguaaacgaacauacucagauagaggauggggcaacggauguggcuuguuuggaaaagguagcauaguagcaugcgcuaaauuuacaugcgcaaagucaaugucauuauuugaaguagaucaaacaaaaauacaauauguaauaagagcucaauuacacgugggugcaaaacaagaaaauuggaauacagacauaaagacacuaaaguucgacgcauuaaguggaucacaagagguagaauuuauaggguacggaaaagcgacuuuagagugucaaguccaaacagcaguagauuucgguaacucauacauagcagaaauggaaacugaaaguuggauaguagauagacaaugggcacaagacuugacacuaccuuggcaaucaggaagcggaggaguauggagagaaaugcaucauuuaguagaauuugaaccaccucaugcagcaacaauaagaguauuagcccuaggaaaccaagaaggaaguuuaaaaacagcacuaacaggagcuaugagaguaacaaaagauacaaaugacaacaaucuauacaaauuacacggaggacauguaagcugccggguaaaguugagcgcacuaacauuaaaaggaacgaguuauaaaauaugcacagauaaaauguucuuuguuaaaaauccuacagauaccggucauggaacaguaguaaugcaaguaaaaguaaguaaaggcgcucccuguagaauaccuguaauagucgcagacgauuuaaccgcagcaauaaauaaaggaauauuagucacgguaaacccaauagcgucaacaaaugaugaugaaguauuaauagaaguuaacccaccuuuuggagacaguuauauaauagucggaaggggugauaguagacuaacauaccaauggcauaaagaaggaagcucaauaggaaguacacuaggaaaagcauuuaguacaacauuaaaaggagcacaaagauuagcagcauuaggagauacagcaugggauuuuggaagcauaggaggaguauuuaauaguauagguagagcaguacaucaaguauuuggaggagcauuuagaacauuauuuggaggaaugaguuggauaacacaaggauuaaugggagcauuauuauuauggaugggaguaaaugcaagagauagaaguauagcauuagcauuuuuagcaacaggaggaguauuaguauuuuuagcaacaaauguacaugcaugaggacuagugcaucacauuuaaaagcaucucagccuaccaugagaauaagagaaagaaaaugaagaucaauagcuuauucaucucuuuuucuuuuucguugguguaaagccaacacccugucuaaaaaacauaaauuucuuuaaucauuuugccucuuuucucugugcuucaauuaauaaaaaauggaaagaaccuagaucuaaaaaaaaaaaaaaaaaaaaaaaaaaaaaaaaaaaaaaaaaaaaaaaaaaaaaaaaaaaaaaaaugcaucccccccccccccccccccccccccccccccaaaggcucuuuucagagccaccagaauu

SEQ ID NO: 2003 - RNA, 2446 nt, Artificial Sequence
  mRNA product Design i-2 comprising derived and/or modified sequence from YFV__NC_002031.1__X-SS-prME (polyprotein: aa92-778) (opt6)
ggggcgcugccuacggagguggcagccaucuccuucucggcaucaagcuuaccaugagaggauuaucaaguagaaaaagaagaucacaugauguacuaaccgugcaauuuuugaucuuagggaugcucuuaaugacaggagguguuacauuaguaagaaagaaucgauggcugcuuuuaaaugugacaucagaggauuuagggaaaacauuuucgguaggaacaggaaauuguacuacaaauauacuugaagcaaaauauuggugcccagacucuauggaauauaauuguccaaauuuaaguccuagagaagaaccugacgauauagauuguugguguuaugguguagaaaauguaagaguagcauacggcaaaugcgauagugcaggacguucuagacguucaaggagagccauagaucugcccacucacgaaaaucacggauugaaaacacgacaagaaaaauggaugacugggcgaaugggagaaagacaacuacagaaaauugaaagaugguucguuagaaauccauucuuugccguaacagcuuuaacaauagccuauuuaguagguaguaauaugacacaaagaguaguaauagcauugcuaguguuagcaguuggaccagcuuauagugcacauugcauaggaauaacagauagagacuuuauagaaggaguacacgggggaacuuggguaagugccacuuuagaacaagauaaauguguuacagugauggcgccagauaaaccaagucuggacauaaguuuggaaacaguagcgauugauagacccgcagaaguaagaaaaguuuguuauaaugcuguucuaacccauguuaaaauaaaugauaaaugcccuagcaccggagaagcccaucuagcagaagaaaaugaaggagauaacgcauguaaacgaacauacucagauagaggauggggcaacggauguggcuuguuuggaaaagguagcauaguagcaugcgcuaaauuuacaugcgcaaagucaaugucauuauuugaaguagaucaaacaaaaauacaauauguaauaagagcucaauuacacgugggugcaaaacaagaaaauuggaauacagacauaaagacacuaaaguucgacgcauuaaguggaucacaagagguagaauuuauaggguacggaaaagcgacuuuagagugucaaguccaaacagcaguagauuucgguaacucauacauagcagaaauggaaacugaaaguuggauaguagauagacaaugggcacaagacuugacacuaccuuggcaaucaggaagcggaggaguauggagagaaaugcaucauuuaguagaauuugaaccaccucaugcagcaacaauaagaguauuagcccuaggaaaccaagaaggaaguuuaaaaacagcacuaacaggagcuaugagaguaacaaaagauacaaaugacaacaaucuauacaaauuacacggaggacauguaagcugccggguaaaguugagcgcacuaacauuaaaaggaacgaguuauaaaauaugcacagauaaaauguucuuuguuaaaaauccuacagauaccggucauggaacaguaguaaugcaaguaaaaguaaguaaaggcgcucccuguagaauaccuguaauagucgcagacgauuuaaccgcagcaauaaauaaaggaauauuagucacgguaaacccaauagcgucaacaaaugaugaugaaguauuaauagaaguuaacccaccuuuuggagacaguuauauaauagucggaaggggugauaguagacuaacauaccaauggcauaaagaaggaagcucaauaggaaaauuauuuacucaaaccaugaaagguguagaaaggcuagcuguuaugggugacacagcaugggauuuuucaagcgcaggaggguucuuuacaucaguagguaaaggaauacauacaguauuuggaagugcauuucaaggauuauuuggugguuuaaauuggauaacaaaaguaauaaugggcgcaguuuuaauauggguagguauaaacacaagaaauaugacaaugucuaugaguaugauauuggucggaguaauaaugauguuuuuaucacuaggagugggugcaugaggacuagugcaucacauuuaaaagcaucucagccuaccaugagaauaagagaaagaaaaugaagaucaauagcuuauucaucucuuuuucuuuuucguugguguaaagccaacacccugucuaaaaaacauaaauuucuuuaaucauuuugccucuuuucucugugcuucaauuaauaaaaaauggaaagaaccuagaucuaaaaaaaaaaaaaaaaaaaaaaaaaaaaaaaaaaaaaaaaaaaaaaaaaaaaaaaaaaaaaaaaugcaucccccccccccccccccccccccccccccccaaaggcucuuuucagagccaccagaauu

SEQ ID NO: 2004 - RNA, 2449 nt, Artificial Sequence
  mRNA product Design i-2 comprising derived and/or modified sequence from YFV__NC_002031.1__SSjev(V3)-prME-XX (polyprotein: aa122-788) (opt6)
ggggcgcugccuacggagguggcagccaucuccuucucggcaucaagcuuaccaugaaugaagguucaauuaugugguuggcaucauuagcaguuguaauugcaugugcuggugcaguuacauuaguaagaaagaaucgauggcugcuuuuaaaugugacaucagaggauuuagggaaaacauuuucgguaggaacaggaaauuguacuacaaauauacuugaagcaaaauauuggugcccagacucuauggaauauaauuguccaaauuuaaguccuagagaagaaccugacgauauagauuguugguguuaugguguagaaaauguaagaguagcauacggcaaaugcgauagugcaggacguucuagacguucaaggagagccauagaucugcccacucacgaaaaucacggauugaaaacacgacaagaaaaauggaugacugggcgaaugggagaaagacaacuacagaaaauugaaagaugguucguuagaaauccauucuuugccguaacagcuuuaacaauagccuauuuaguagguaguaauaugacacaaagaguaguaauagcauugcuaguguuagcaguuggaccagcuuauagugcacauugcauaggaauaacagauagagacuuuauagaaggaguacacgggggaacuuggguaagugccacuuuagaacaagauaaauguguuacagugauggcgccagauaaaccaagucuggacauaaguuuggaaacaguagcgauugauagacccgcagaaguaagaaaaguuuguuauaaugcuguucuaacccauguuaaaauaaaugauaaaugcccuagcaccggagaagcccaucuagcagaagaaaaugaaggagauaacgcauguaaacgaacauacucagauagaggauggggcaacggauguggcuuguuuggaaaagguagcauaguagcaugcgcuaaauuuacaugcgcaaagucaaugucauuauuugaaguagaucaaacaaaaauacaauauguaauaagagcucaauuacacgugggugcaaaacaagaaaauuggaauacagacauaaagacacuaaaguucgacgcauuaaguggaucacaagagguagaauuuauaggguacggaaaagcgacuuuagagugucaaguccaaacagcaguagauuucgguaacucauacauagcagaaauggaaacugaaaguuggauaguagauagacaaugggcacaagacuugacacuaccuuggcaaucaggaagcggaggaguauggagagaaaugcaucauuuaguagaauuugaaccaccucaugcagcaacaauaagaguauuagcccuaggaaaccaagaaggaaguuuaaaaacagcacuaacaggagcuaugagaguaacaaaagauacaaaugacaacaaucuauacaaauuacacggaggacauguaagcugccggguaaaguugagcgcacuaacauuaaaaggaacgaguuauaaaauaugcacagauaaaauguucuuuguuaaaaauccuacagauaccggucauggaacaguaguaaugcaaguaaaaguaaguaaaggcgcucccuguagaauaccuguaauagucgcagacgauuuaaccgcagcaauaaauaaaggaauauuagucacgguaaacccaauagcgucaacaaaugaugaugaaguauuaauagaaguuaacccaccuuuuggagacaguuauauaauagucggaaggggugauaguagacuaacauaccaauggcauaaagaaggaagcucaauaggaaaauuauuuacucaaaccaugaaagguguagaaaggcuagcuguuaugggugacacagcaugggauuuuucaagcgcaggaggguucuuuacaucaguagguaaaggaauacauacaguauuuggaagugcauuucaaggauuauuuggugguuuaaauuggauaacaaaaguaauaaugggcgcaguuuuaauauggguagguauaaacacaagaaauaugacaaugucuaugaguaugauauuggucggaguaauaaugauguuuuuaucacuaggagugggugcagaucaagguugcgcuauuaauuuuggaaaaugaggacuagugcaucacauuuaaaagcaucucagccuaccaugagaauaagagaaagaaaaugaagaucaauagcuuauucaucucuuuuucuuuuucguugguguaaagccaacacccugucuaaaaaacauaaauuucuuuaaucauuuugccucuuuucucugugcuucaauuaauaaaaaauggaaagaaccuagaucuaaaaaaaaaaaaaaaaaaaaaaaaaaaaaaaaaaaaaaaaaaaaaaaaaaaaaaaaaaaaaaaaugcaucccccccccccccccccccccccccccccccaaaggcucuuuucagagccaccagaauu

SEQ ID NO: 2005 - RNA, 2458 nt, Artificial Sequence
  mRNA product Design i-2 comprising derived and/or modified sequence from YFV__NC_002031.1__X-SS-prMEdelstem_TM-JEV (polyprotein: aa92-681) (opt11)
ggggcgcugccuacggagguggcagccaucuccuucucggcaucaagcuuaccaugcggggacuaagcagcagaaaaagacgcagccacgaugugcucaccgugcaauuccucauacuggggaugcuccuaaugaccggaggcgugacccuaguaaggaaaaacagauggcuacuacuaaacguaaccucagaagaucuaggaaagacauuuucagucggcacaggcaacugcacaaccaacauacuagaagcaaaauauuggugcccagacagcauggaauacaacugucccaaccucagcccaagagaggaaccagacgacauagacugcugguguuacggaguagaaaacguaagaguggcauacggcaaaugcgacagcgcaggcaggagccgaagaucccgcagagccaucgacuugcccacgcacgaaaaccacggccucaaaacacgacaagaaaaauggaugacagggcgaaugggagaacgacagcuccagaaaauagaacgaugguucguccggaacccguucuucgcaguaacggcacuaacaaucgcauaccucguaggcagcaacaugacacaaagaguggucaucgcgcuacucguacuagcaguggggcccgcauacagugcacacugcauaggaaucacagaccgugacuucaucgaaggcguacacggaggaacguggguaagcgcgacacuggaacaagacaaaugcgugacaguaauggcaccagacaaaccaagccuagacauaucccuagaaacggucgccaucgaccgucccgcagaaguacgaaagguaugcuauaaugcaguccucacacacgucaaaauaaacgacaaaugccccagcacgggcgaagcacaccucgccgaagaaaacgaaggggauaacgcgugcaaacgcaccuacuccgacaggggauggggcaacggaugcggacuguucggaaaaggauccauagucgcaugcgcaaaauuuaccugcgcaaaaagcaugagcuuguucgagguagaccaaacgaagauccaauacguaauccgagcucaacuacacguuggggccaagcaagagaacuggaauacggacaucaaaacacuaaaauucgacgcacucuccggcucacaagaagucgaguucaucggcuacggcaaagcaacacuagaaugccaaguacaaacagcgguggacuucggcaacagcuacauagcagaaauggaaacagaaagcuggauaguagaccgacaaugggcacaagaccuaacucugccauggcaaagcggcucaggaggaguguggagagagaugcaccaccugguagaguucgaacccccacacgcagcaacaauaaggguacuggcacuaggcaaccaagaaggcagccuaaaaaccgcacucacaggagccaugcgcgugacgaaggacaccaacgacaacaaccucuacaaacuccacggagggcacguauccugccgcguaaaacuaucagcacuaacgcuaaaaggaacaagcuacaaaauaugcacagacaaaauguucuucgucaaaaaccccacagacacaggccacggcacagucguaaugcaagugaaggucagcaagggggcccccugccgaaucccagucauaguggcagacgaccucacggccgccaucaacaaagggauccugguaacagugaacccaauagcaucgaccaacgacgacgaaguccucauagaagugaaucccccguucggcgacagcuacaucaucguaggacgcggcgacucccgacugacguaccaauggcauaaagaaggcagcagcauugggagcacgcucgggaaagcguucucgaccacgcucaagggcgcgcaaaggcucgcggccuugggcgauaccgcgugggauuucgggagcauaggcggggucuuuaacucgaucgggcgcgcgguccaucaaguguucgggggcgcguucaggaccuuguucgggggcaugagcuggaucacgcaagggcucaugggcgcgcucuugcucuggaugggggucaaugccagggacaggagcauagccuuggccuuucucgcgaccgggggcgugcucguguucuuggccacgaacgugcacgcgugaggacuagugcaucacauuuaaaagcaucucagccuaccaugagaauaagagaaagaaaaugaagaucaauagcuuauucaucucuuuuucuuuuucguugguguaaagccaacacccugucuaaaaaacauaaauuucuuuaaucauuuugccucuuuucucugugcuucaauuaauaaaaaauggaaagaaccuagaucuaaaaaaaaaaaaaaaaaaaaaaaaaaaaaaaaaaaaaaaaaaaaaaaaaaaaaaaaaaaaaaaaugcaucccccccccccccccccccccccccccccccaaaggcucuuuucagagccaccagaauu

SEQ ID NO: 2006 - RNA, 2431 nt, Artificial Sequence
  mRNA product Design i-2 comprising derived and/or modified sequence from YFV__NC_002031.1__SSjev(V3)-prMEdelstem_TM-JEV (polyprotein: aa122-681) (opt11)
ggggcgcugccuacggagguggcagccaucuccuucucggcaucaagcuuaccaugaacgagggcucgaucaugugguuggccucgcucgcggucgugaucgcgugcgcgggcgcggugacccuaguaaggaaaaacagauggcuacuacuaaacguaaccucagaagaucuaggaaagacauuuucagucggcacaggcaacugcacaaccaacauacuagaagcaaaauauuggugcccagacagcauggaauacaacugucccaaccucagcccaagagaggaaccagacgacauagacugcugguguuacggaguagaaaacguaagaguggcauacggcaaaugcgacagcgcaggcaggagccgaagaucccgcagagccaucgacuugcccacgcacgaaaaccacggccucaaaacacgacaagaaaaauggaugacagggcgaaugggagaacgacagcuccagaaaauagaacgaugguucguccggaacccguucuucgcaguaacggcacuaacaaucgcauaccucguaggcagcaacaugacacaaagaguggucaucgcgcuacucguacuagcaguggggcccgcauacagugcacacugcauaggaaucacagaccgugacuucaucgaaggcguacacggaggaacguggguaagcgcgacacuggaacaagacaaaugcgugacaguaauggcaccagacaaaccaagccuagacauaucccuagaaacggucgccaucgaccgucccgcagaaguacgaaagguaugcuauaaugcaguccucacacacgucaaaauaaacgacaaaugccccagcacgggcgaagcacaccucgccgaagaaaacgaaggggauaacgcgugcaaacgcaccuacuccgacaggggauggggcaacggaugcggacuguucggaaaaggauccauagucgcaugcgcaaaauuuaccugcgcaaaaagcaugagcuuguucgagguagaccaaacgaagauccaauacguaauccgagcucaacuacacguuggggccaagcaagagaacuggaauacggacaucaaaacacuaaaauucgacgcacucuccggcucacaagaagucgaguucaucggcuacggcaaagcaacacuagaaugccaaguacaaacagcgguggacuucggcaacagcuacauagcagaaauggaaacagaaagcuggauaguagaccgacaaugggcacaagaccuaacucugccauggcaaagcggcucaggaggaguguggagagagaugcaccaccugguagaguucgaacccccacacgcagcaacaauaaggguacuggcacuaggcaaccaagaaggcagccuaaaaaccgcacucacaggagccaugcgcgugacgaaggacaccaacgacaacaaccucuacaaacuccacggagggcacguauccugccgcguaaaacuaucagcacuaacgcuaaaaggaacaagcuacaaaauaugcacagacaaaauguucuucgucaaaaaccccacagacacaggccacggcacagucguaaugcaagugaaggucagcaagggggcccccugccgaaucccagucauaguggcagacgaccucacggccgccaucaacaaagggauccugguaacagugaacccaauagcaucgaccaacgacgacgaaguccucauagaagugaaucccccguucggcgacagcuacaucaucguaggacgcggcgacucccgacugacguaccaauggcauaaagaaggcagcagcauugggagcacgcucgggaaagcguucucgaccacgcucaagggcgcgcaaaggcucgcggccuugggcgauaccgcgugggauuucgggagcauaggcggggucuuuaacucgaucgggcgcgcgguccaucaaguguucgggggcgcguucaggaccuuguucgggggcaugagcuggaucacgcaagggcucaugggcgcgcucuugcucuggaugggggucaaugccagggacaggagcauagccuuggccuuucucgcgaccgggggcgugcucguguucuuggccacgaacgugcacgcgugaggacuagugcaucacauuuaaaagcaucucagccuaccaugagaauaagagaaagaaaaugaagaucaauagcuuauucaucucuuuuucuuuuucguugguguaaagccaacacccugucuaaaaaacauaaauuucuuuaaucauuuugccucuuuucucugugcuucaauuaauaaaaaauggaaagaaccuagaucuaaaaaaaaaaaaaaaaaaaaaaaaaaaaaaaaaaaaaaaaaaaaaaaaaaaaaaaaaaaaaaaaugcaucccccccccccccccccccccccccccccccaaaggcucuuuucagagccaccagaauu

SEQ ID NO: 2007 - RNA, 2446 nt, Artificial Sequence
  mRNA product Design i-2 comprising derived and/or modified sequence from YFV__NC_002031.1__X-SS-prME (polyprotein: aa92-778) (opt11)
ggggcgcugccuacggagguggcagccaucuccuucucggcaucaagcuuaccaugcggggacuaagcagcagaaaaagacgcagccacgaugugcucaccgugcaauuccucauacuggggaugcuccuaaugaccggaggcgugacccuaguaaggaaaaacagauggcuacuacuaaacguaaccucagaagaucuaggaaagacauuuucagucggcacaggcaacugcacaaccaacauacuagaagcaaaauauuggugcccagacagcauggaauacaacugucccaaccucagcccaagagaggaaccagacgacauagacugcugguguuacggaguagaaaacguaagaguggcauacggcaaaugcgacagcgcaggcaggagccgaagaucccgcagagccaucgacuugcccacgcacgaaaaccacggccucaaaacacgacaagaaaaauggaugacagggcgaaugggagaacgacagcuccagaaaauagaacgaugguucguccggaacccguucuucgcaguaacggcacuaacaaucgcauaccucguaggcagcaacaugacacaaagaguggucaucgcgcuacucguacuagcaguggggcccgcauacagugcacacugcauaggaaucacagaccgugacuucaucgaaggcguacacggaggaacguggguaagcgcgacacuggaacaagacaaaugcgugacaguaauggcaccagacaaaccaagccuagacauaucccuagaaacggucgccaucgaccgucccgcagaaguacgaaagguaugcuauaaugcaguccucacacacgucaaaauaaacgacaaaugccccagcacgggcgaagcacaccucgccgaagaaaacgaaggggauaacgcgugcaaacgcaccuacuccgacaggggauggggcaacggaugcggacuguucggaaaaggauccauagucgcaugcgcaaaauuuaccugcgcaaaaagcaugagcuuguucgagguagaccaaacgaagauccaauacguaauccgagcucaacuacacguuggggccaagcaagagaacuggaauacggacaucaaaacacuaaaauucgacgcacucuccggcucacaagaagucgaguucaucggcuacggcaaagcaacacuagaaugccaaguacaaacagcgguggacuucggcaacagcuacauagcagaaauggaaacagaaagcuggauaguagaccgacaaugggcacaagaccuaacucugccauggcaaagcggcucaggaggaguguggagagagaugcaccaccugguagaguucgaacccccacacgcagcaacaauaaggguacuggcacuaggcaaccaagaaggcagccuaaaaaccgcacucacaggagccaugcgcgugacgaaggacaccaacgacaacaaccucuacaaacuccacggagggcacguauccugccgcguaaaacuaucagcacuaacgcuaaaaggaacaagcuacaaaauaugcacagacaaaauguucuucgucaaaaaccccacagacacaggccacggcacagucguaaugcaagugaaggucagcaagggggcccccugccgaaucccagucauaguggcagacgaccucacggccgccaucaacaaagggauccugguaacagugaacccaauagcaucgaccaacgacgacgaaguccucauagaagugaaucccccguucggcgacagcuacaucaucguaggacgcggcgacucccgacugacguaccaauggcauaaagaaggcagcagcauuggaaaacuauucacccaaaccaugaagggcgucgaaagacucgcggugaugggagacaccgcaugggacuucucgagcgcaggcggcuucuucacaagcguaggaaaagggauucacacaguauucggauccgcauuccaaggccucuucgggggacuaaacuggauaacgaaaguaauaaugggagcaguucucauauggguaggaaucaacacacgaaacaugacaauguccaugucaaugauacucguaggcguaaucaugauguuucugucacucggagugggagcaugaggacuagugcaucacauuuaaaagcaucucagccuaccaugagaauaagagaaagaaaaugaagaucaauagcuuauucaucucuuuuucuuuuucguugguguaaagccaacacccugucuaaaaaacauaaauuucuuuaaucauuuugccucuuuucucugugcuucaauuaauaaaaaauggaaagaaccuagaucuaaaaaaaaaaaaaaaaaaaaaaaaaaaaaaaaaaaaaaaaaaaaaaaaaaaaaaaaaaaaaaaaugcaucccccccccccccccccccccccccccccccaaaggcucuuuucagagccaccagaauu

SEQ ID NO: 2008 - RNA, 2449 nt, Artificial Sequence
  mRNA product Design i-2 comprising derived and/or modified sequence from YFV__NC_002031.1__SSjev(V3)-prME-XX (polyprotein: aa122-788) (opt11)
ggggcgcugccuacggagguggcagccaucuccuucucggcaucaagcuuaccaugaacgagggcucgaucaugugguuggccucgcucgcggucgugaucgcgugcgcgggcgcggugacccuaguaaggaaaaacagauggcuacuacuaaacguaaccucagaagaucuaggaaagacauuuucagucggcacaggcaacugcacaaccaacauacuagaagcaaaauauuggugcccagacagcauggaauacaacugucccaaccucagcccaagagaggaaccagacgacauagacugcugguguuacggaguagaaaacguaagaguggcauacggcaaaugcgacagcgcaggcaggagccgaagaucccgcagagccaucgacuugcccacgcacgaaaaccacggccucaaaacacgacaagaaaaauggaugacagggcgaaugggagaacgacagcuccagaaaauagaacgaugguucguccggaacccguucuucgcaguaacggcacuaacaaucgcauaccucguaggcagcaacaugacacaaagaguggucaucgcgcuacucguacuagcaguggggcccgcauacagugcacacugcauaggaaucacagaccgugacuucaucgaaggcguacacggaggaacguggguaagcgcgacacuggaacaagacaaaugcgugacaguaauggcaccagacaaaccaagccuagacauaucccuagaaacggucgccaucgaccgucccgcagaaguacgaaagguaugcuauaaugcaguccucacacacgucaaaauaaacgacaaaugccccagcacgggcgaagcacaccucgccgaagaaaacgaaggggauaacgcgugcaaacgcaccuacuccgacaggggauggggcaacggaugcggacuguucggaaaaggauccauagucgcaugcgcaaaauuuaccugcgcaaaaagcaugagcuuguucgagguagaccaaacgaagauccaauacguaauccgagcucaacuacacguuggggccaagcaagagaacuggaauacggacaucaaaacacuaaaauucgacgcacucuccggcucacaagaagucgaguucaucggcuacggcaaagcaacacuagaaugccaaguacaaacagcgguggacuucggcaacagcuacauagcagaaauggaaacagaaagcuggauaguagaccgacaaugggcacaagaccuaacucugccauggcaaagcggcucaggaggaguguggagagagaugcaccaccugguagaguucgaacccccacacgcagcaacaauaaggguacuggcacuaggcaaccaagaaggcagccuaaaaaccgcacucacaggagccaugcgcgugacgaaggacaccaacgacaacaaccucuacaaacuccacggagggcacguauccugccgcguaaaacuaucagcacuaacgcuaaaaggaacaagcuacaaaauaugcacagacaaaauguucuucgucaaaaaccccacagacacaggccacggcacagucguaaugcaagugaaggucagcaagggggcccccugccgaaucccagucauaguggcagacgaccucacggccgccaucaacaaagggauccugguaacagugaacccaauagcaucgaccaacgacgacgaaguccucauagaagugaaucccccguucggcgacagcuacaucaucguaggacgcggcgacucccgacugacguaccaauggcauaaagaaggcagcagcauuggaaaacuauucacccaaaccaugaagggcgucgaaagacucgcggugaugggagacaccgcaugggacuucucgagcgcaggcggcuucuucacaagcguaggaaaagggauucacacaguauucggauccgcauuccaaggccucuucgggggacuaaacuggauaacgaaaguaauaaugggagcaguucucauauggguaggaaucaacacacgaaacaugacaauguccaugucaaugauacucguaggcguaaucaugauguuucugucacucggagugggagcagaccaagguugcgccauaaacuucggcaagugaggacuagugcaucacauuuaaaagcaucucagccuaccaugagaauaagagaaagaaaaugaagaucaauagcuuauucaucucuuuuucuuuuucguugguguaaagccaacacccugucuaaaaaacauaaauuucuuuaaucauuuugccucuuuucucugugcuucaauuaauaaaaaauggaaagaaccuagaucuaaaaaaaaaaaaaaaaaaaaaaaaaaaaaaaaaaaaaaaaaaaaaaaaaaaaaaaaaaaaaaaaugcaucccccccccccccccccccccccccccccccaaaggcucuuuucagagccaccagaauu

SEQ ID NO: 2009 - RNA, 2462 nt, Artificial Sequence
  mRNA product Design i-2 comprising derived and/or modified sequence from YFV__NC_002031.1__X-SS-prMEdelstem_TM-JEV (polyprotein: aa92-681) (wt)
gggagaggcgcugccuacggagguggcagccaucuccuucucggcaucaagcuuaccaugagaggauuguccucaaggaaacgccguucccaugauguucugacugugcaauuccuaauuuugggaaugcuguugaugacggguggagugaccuuggugcggaaaaacagaugguugcuccuaaaugugacaucugaggaccucgggaaaacauucucugugggcacaggcaacugcacaacaaacauuuuggaagccaaguacuggugcccagacucaauggaauacaacugucccaaucucaguccaagagaggagccagaugacauugauugcuggugcuaugggguggaaaacguuagagucgcauaugguaagugugacucagcaggcaggucuaggaggucaagaagggccauugacuugccuacgcaugaaaaccaugguuugaagacccggcaagaaaaauggaugacuggaagaaugggugaaaggcaacuccaaaagauugagagaugguucgugaggaaccccuuuuuugcagugacggcucugaccauugccuaccuugugggaagcaacaugacgcaacgagucgugauugcccuacuggucuuggcuguugguccggccuacucagcucacugcauuggaauuacugacagggauuucauugagggggugcauggaggaacuuggguuucagcuacccuggagcaagacaagugugucacuguuauggccccugacaagccuucauuggacaucucacuagagacaguagccauugauagaccugcugaggugaggaaaguguguuacaaugcaguucucacucaugugaagauuaaugacaagugccccagcacuggagaggcccaccuagcugaagagaacgaaggggacaaugcgugcaagcgcacuuauucugauagaggcuggggcaauggcuguggccuauuugggaaagggagcauuguggcaugcgccaaauucacuugugccaaauccaugaguuuguuugagguugaucagaccaaaauucaguaugucaucagagcacaauugcauguaggggccaagcaggaaaauuggaauaccgacauuaagacucucaaguuugaugcccugucaggcucccaggaagucgaguucauuggguauggaaaagcuacacuggaaugccaggugcaaacugcgguggacuuugguaacaguuacaucgcugagauggaaacagagagcuggauaguggacagacagugggcccaggacuugacccugccauggcagaguggaaguggcgggguguggagagagaugcaucaucuugucgaauuugaaccuccgcaugccgccacuaucagaguacuggcccugggaaaccaggaaggcuccuugaaaacagcucuuacuggcgcaaugaggguuacaaaggacacaaaugacaacaaccuuuacaaacuacaugguggacauguuucuugcagagugaaauugucagcuuugacacucaaggggacauccuacaaaauaugcacugacaaaauguuuuuugucaagaacccaacugacacuggccauggcacuguugugaugcaggugaaagugucaaaaggagcccccugcaggauuccagugauaguagcugaugaucuuacagcggcaaucaauaaaggcauuuugguuacaguuaaccccaucgccucaaccaaugaugaugaagugcugauugaggugaacccaccuuuuggagacagcuacauuaucguugggagaggagauucacgucucacuuaccaguggcacaaagagggaagcucaauaggcagcacgcugggcaaggccuuuucaacaacuuugaagggagcucaaagacuggcagcguugggcgacacagccugggacuuuggcucuauuggaggggucuucaacuccauaggaagagccguucaccaaguguuugguggugccuucagaacacucuuugggggaaugucuuggaucacacaagggcuaaugggugcccuacugcucuggaugggcgucaacgcacgagaccgaucaauugcuuuggccuucuuagccacaggaggugugcucguguucuuagcgaccaaugugcacgccuaaggacuagugcaucacauuuaaaagcaucucagccuaccaugagaauaagagaaagaaaaugaagaucaauagcuuauucaucucuuuuucuuuuucguugguguaaagccaacacccugucuaaaaaacauaaauuucuuuaaucauuuugccucuuuucucugugcuucaauuaauaaaaaauggaaagaaccuagaucuaaaaaaaaaaaaaaaaaaaaaaaaaaaaaaaaaaaaaaaaaaaaaaaaaaaaaaaaaaaaaaaaugcaucccccccccccccccccccccccccccccccaaaggcucuuuucagagccaccagaauu

SEQ ID NO: 2010 - RNA, 2435 nt, Artificial Sequence
  mRNA product Design i-2 comprising derived and/or modified sequence from YFV__NC_002031.1__SSjev(V3)-prMEdelstem_TM-JEV (polyprotein: aa122-681) (wt)
gggagaggcgcugccuacggagguggcagccaucuccuucucggcaucaagcuuaccaugaaugaaggcucaaucauguggcucgcgagcuuggcaguugucauagcuugugcaggagccgugaccuuggugcggaaaaacagaugguugcuccuaaaugugacaucugaggaccucgggaaaacauucucugugggcacaggcaacugcacaacaaacauuuuggaagccaaguacuggugcccagacucaauggaauacaacugucccaaucucaguccaagagaggagccagaugacauugauugcuggugcuaugggguggaaaacguuagagucgcauaugguaagugugacucagcaggcaggucuaggaggucaagaagggccauugacuugccuacgcaugaaaaccaugguuugaagacccggcaagaaaaauggaugacuggaagaaugggugaaaggcaacuccaaaagauugagagaugguucgugaggaaccccuuuuuugcagugacggcucugaccauugccuaccuugugggaagcaacaugacgcaacgagucgugauugcccuacuggucuuggcuguugguccggccuacucagcucacugcauuggaauuacugacagggauuucauugagggggugcauggaggaacuuggguuucagcuacccuggagcaagacaagugugucacuguuauggccccugacaagccuucauuggacaucucacuagagacaguagccauugauagaccugcugaggugaggaaaguguguuacaaugcaguucucacucaugugaagauuaaugacaagugccccagcacuggagaggcccaccuagcugaagagaacgaaggggacaaugcgugcaagcgcacuuauucugauagaggcuggggcaauggcuguggccuauuugggaaagggagcauuguggcaugcgccaaauucacuugugccaaauccaugaguuuguuugagguugaucagaccaaaauucaguaugucaucagagcacaauugcauguaggggccaagcaggaaaauuggaauaccgacauuaagacucucaaguuugaugcccugucaggcucccaggaagucgaguucauuggguauggaaaagcuacacuggaaugccaggugcaaacugcgguggacuuugguaacaguuacaucgcugagauggaaacagagagcuggauaguggacagacagugggcccaggacuugacccugccauggcagaguggaaguggcgggguguggagagagaugcaucaucuugucgaauuugaaccuccgcaugccgccacuaucagaguacuggcccugggaaaccaggaaggcuccuugaaaacagcucuuacuggcgcaaugaggguuacaaaggacacaaaugacaacaaccuuuacaaacuacaugguggacauguuucuugcagagugaaauugucagcuuugacacucaaggggacauccuacaaaauaugcacugacaaaauguuuuuugucaagaacccaacugacacuggccauggcacuguugugaugcaggugaaagugucaaaaggagcccccugcaggauuccagugauaguagcugaugaucuuacagcggcaaucaauaaaggcauuuugguuacaguuaaccccaucgccucaaccaaugaugaugaagugcugauugaggugaacccaccuuuuggagacagcuacauuaucguugggagaggagauucacgucucacuuaccaguggcacaaagagggaagcucaauaggcagcacgcugggcaaggccuuuucaacaacuuugaagggagcucaaagacuggcagcguugggcgacacagccugggacuuuggcucuauuggaggggucuucaacuccauaggaagagccguucaccaaguguuugguggugccuucagaacacucuuugggggaaugucuuggaucacacaagggcuaaugggugcccuacugcucuggaugggcgucaacgcacgagaccgaucaauugcuuuggccuucuuagccacaggaggugugcucguguucuuagcgaccaaugugcacgccuaaggacuagugcaucacauuuaaaagcaucucagccuaccaugagaauaagagaaagaaaaugaagaucaauagcuuauucaucucuuuuucuuuuucguugguguaaagccaacacccugucuaaaaaacauaaauuucuuuaaucauuuugccucuuuucucugugcuucaauuaauaaaaaauggaaagaaccuagaucuaaaaaaaaaaaaaaaaaaaaaaaaaaaaaaaaaaaaaaaaaaaaaaaaaaaaaaaaaaaaaaaaugcaucccccccccccccccccccccccccccccccaaaggcucuuuucagagccaccagaauu

SEQ ID NO: 2011 - RNA, 2450 nt, Artificial Sequence
  mRNA product Design i-2 comprising derived and/or modified sequence from YFV__NC_002031.1__X-SS-prME (polyprotein: aa92-778) (wt)
gggagaggcgcugccuacggagguggcagccaucuccuucucggcaucaagcuuaccaugagaggauuguccucaaggaaacgccguucccaugauguucugacugugcaauuccuaauuuugggaaugcuguugaugacggguggagugaccuuggugcggaaaaacagaugguugcuccuaaaugugacaucugaggaccucgggaaaacauucucugugggcacaggcaacugcacaacaaacauuuuggaagccaaguacuggugcccagacucaauggaauacaacugucccaaucucaguccaagagaggagccagaugacauugauugcuggugcuaugggguggaaaacguuagagucgcauaugguaagugugacucagcaggcaggucuaggaggucaagaagggccauugacuugccuacgcaugaaaaccaugguuugaagacccggcaagaaaaauggaugacuggaagaaugggugaaaggcaacuccaaaagauugagagaugguucgugaggaaccccuuuuuugcagugacggcucugaccauugccuaccuugugggaagcaacaugacgcaacgagucgugauugcccuacuggucuuggcuguugguccggccuacucagcucacugcauuggaauuacugacagggauuucauugagggggugcauggaggaacuuggguuucagcuacccuggagcaagacaagugugucacuguuauggccccugacaagccuucauuggacaucucacuagagacaguagccauugauagaccugcugaggugaggaaaguguguuacaaugcaguucucacucaugugaagauuaaugacaagugccccagcacuggagaggcccaccuagcugaagagaacgaaggggacaaugcgugcaagcgcacuuauucugauagaggcuggggcaauggcuguggccuauuugggaaagggagcauuguggcaugcgccaaauucacuugugccaaauccaugaguuuguuugagguugaucagaccaaaauucaguaugucaucagagcacaauugcauguaggggccaagcaggaaaauuggaauaccgacauuaagacucucaaguuugaugcccugucaggcucccaggaagucgaguucauuggguauggaaaagcuacacuggaaugccaggugcaaacugcgguggacuuugguaacaguuacaucgcugagauggaaacagagagcuggauaguggacagacagugggcccaggacuugacccugccauggcagaguggaaguggcgggguguggagagagaugcaucaucuugucgaauuugaaccuccgcaugccgccacuaucagaguacuggcccugggaaaccaggaaggcuccuugaaaacagcucuuacuggcgcaaugaggguuacaaaggacacaaaugacaacaaccuuuacaaacuacaugguggacauguuucuugcagagugaaauugucagcuuugacacucaaggggacauccuacaaaauaugcacugacaaaauguuuuuugucaagaacccaacugacacuggccauggcacuguugugaugcaggugaaagugucaaaaggagcccccugcaggauuccagugauaguagcugaugaucuuacagcggcaaucaauaaaggcauuuugguuacaguuaaccccaucgccucaaccaaugaugaugaagugcugauugaggugaacccaccuuuuggagacagcuacauuaucguugggagaggagauucacgucucacuuaccaguggcacaaagagggaagcucaauaggaaaguuguucacucagaccaugaaaggcguggaacgccuggccgucaugggagacaccgccugggauuucagcuccgcuggaggguucuucacuucgguugggaaaggaauccauacgguguuuggcucugccuuucaggggcuauuuggcggcuugaacuggauaacaaaggucaucaugggggcgguacuuauauggguuggcaucaacacaagaaacaugacaauguccaugagcaugaucuugguaggagugaucaugauguuuuugucucuaggaguuggggcguaaggacuagugcaucacauuuaaaagcaucucagccuaccaugagaauaagagaaagaaaaugaagaucaauagcuuauucaucucuuuuucuuuuucguugguguaaagccaacacccugucuaaaaaacauaaauuucuuuaaucauuuugccucuuuucucugugcuucaauuaauaaaaaauggaaagaaccuagaucuaaaaaaaaaaaaaaaaaaaaaaaaaaaaaaaaaaaaaaaaaaaaaaaaaaaaaaaaaaaaaaaaugcaucccccccccccccccccccccccccccccccaaaggcucuuuucagagccaccagaauu

SEQ ID NO: 2012 - RNA, 2453 nt, Artificial Sequence
  mRNA product Design i-2 comprising derived and/or modified sequence from YFV__NC_002031.1__SSjev(V3)-prME-XX (polyprotein: aa122-788) (wt)
gggagaggcgcugccuacggagguggcagccaucuccuucucggcaucaagcuuaccaugaaugaaggcucaaucauguggcucgcgagcuuggcaguugucauagcuugugcaggagccgugaccuuggugcggaaaaacagaugguugcuccuaaaugugacaucugaggaccucgggaaaacauucucugugggcacaggcaacugcacaacaaacauuuuggaagccaaguacuggugcccagacucaauggaauacaacugucccaaucucaguccaagagaggagccagaugacauugauugcuggugcuaugggguggaaaacguuagagucgcauaugguaagugugacucagcaggcaggucuaggaggucaagaagggccauugacuugccuacgcaugaaaaccaugguuugaagacccggcaagaaaaauggaugacuggaagaaugggugaaaggcaacuccaaaagauugagagaugguucgugaggaaccccuuuuuugcagugacggcucugaccauugccuaccuugugggaagcaacaugacgcaacgagucgugauugcccuacuggucuuggcuguugguccggccuacucagcucacugcauuggaauuacugacagggauuucauugagggggugcauggaggaacuuggguuucagcuacccuggagcaagacaagugugucacuguuauggccccugacaagccuucauuggacaucucacuagagacaguagccauugauagaccugcugaggugaggaaaguguguuacaaugcaguucucacucaugugaagauuaaugacaagugccccagcacuggagaggcccaccuagcugaagagaacgaaggggacaaugcgugcaagcgcacuuauucugauagaggcuggggcaauggcuguggccuauuugggaaagggagcauuguggcaugcgccaaauucacuugugccaaauccaugaguuuguuugagguugaucagaccaaaauucaguaugucaucagagcacaauugcauguaggggccaagcaggaaaauuggaauaccgacauuaagacucucaaguuugaugcccugucaggcucccaggaagucgaguucauuggguauggaaaagcuacacuggaaugccaggugcaaacugcgguggacuuugguaacaguuacaucgcugagauggaaacagagagcuggauaguggacagacagugggcccaggacuugacccugccauggcagaguggaaguggcgggguguggagagagaugcaucaucuugucgaauuugaaccuccgcaugccgccacuaucagaguacuggcccugggaaaccaggaaggcuccuugaaaacagcucuuacuggcgcaaugaggguuacaaaggacacaaaugacaacaaccuuuacaaacuacaugguggacauguuucuugcagagugaaauugucagcuuugacacucaaggggacauccuacaaaauaugcacugacaaaauguuuuuugucaagaacccaacugacacuggccauggcacuguugugaugcaggugaaagugucaaaaggagcccccugcaggauuccagugauaguagcugaugaucuuacagcggcaaucaauaaaggcauuuugguuacaguuaaccccaucgccucaaccaaugaugaugaagugcugauugaggugaacccaccuuuuggagacagcuacauuaucguugggagaggagauucacgucucacuuaccaguggcacaaagagggaagcucaauaggaaaguuguucacucagaccaugaaaggcguggaacgccuggccgucaugggagacaccgccugggauuucagcuccgcuggaggguucuucacuucgguugggaaaggaauccauacgguguuuggcucugccuuucaggggcuauuuggcggcuugaacuggauaacaaaggucaucaugggggcgguacuuauauggguuggcaucaacacaagaaacaugacaauguccaugagcaugaucuugguaggagugaucaugauguuuuugucucuaggaguuggggcggaucaaggaugcgccaucaacuuuggcaaguaaggacuagugcaucacauuuaaaagcaucucagccuaccaugagaauaagagaaagaaaaugaagaucaauagcuuauucaucucuuuuucuuuuucguugguguaaagccaacacccugucuaaaaaacauaaauuucuuuaaucauuuugccucuuuucucugugcuucaauuaauaaaaaauggaaagaaccuagaucuaaaaaaaaaaaaaaaaaaaaaaaaaaaaaaaaaaaaaaaaaaaaaaaaaaaaaaaaaaaaaaaaugcaucccccccccccccccccccccccccccccccaaaggcucuuuucagagccaccagaauu

SEQ ID NO: 2013 - RNA, 2462 nt, Artificial Sequence
  mRNA product Design i-2 comprising derived and/or modified sequence from YFV__NC_002031.1__X-SS-prMEdelstem_TM-JEV (polyprotein: aa92-681) (opt1)
gggagaggcgcugccuacggagguggcagccaucuccuucucggcaucaagcuuaccaugcggggccugagcucccgcaagcggcgcagccacgacgugcucaccguccaguuccugauccuggggaugcuccugaugaccggcggggugacgcuggugcggaagaaccgcuggcuccugcugaacgucaccuccgaggaccucggcaagaccuucagcguggggaccggcaacugcacgaccaacauccuggaggccaaguacuggugccccgacuccauggaguacaacugcccgaaccugagcccccgggaggagcccgacgacaucgacugcuggugcuacggcguggagaacguccgcguggccuacgggaagugcgacuccgcgggccggagccgccggucccgccgggccaucgaccuccccacccacgagaaccacgggcugaagacccgccaggagaaguggaugacgggccggaugggggagcgccagcugcagaagaucgagcggugguucgugcgcaacccguucuucgccgucaccgcccucaccaucgccuaccuggugggcagcaacaugacccagcggguggucaucgcgcugcucgugcuggccgugggccccgccuacuccgcccacugcaucgggaucacggaccgcgacuucaucgagggcguccacgggggcaccugggugagcgcgacccuggagcaggacaagugcgugaccgucauggcccccgacaagcccucccucgacaucagccuggagacgguggccaucgaccggccggccgaggugcgcaaggucugcuacaacgccgugcugacccacgugaagaucaacgacaagugccccuccaccggcgaggcgcaccucgccgaggagaacgagggggacaacgccugcaagcggaccuacagcgaccggggcugggggaacggcugcgggcuguucggcaagggcuccaucgucgccugcgccaaguucacgugcgcgaagagcaugucccuguucgagguggaccagaccaagauccaguacgucauccgcgcccagcuccacgugggggccaagcaggagaacuggaacaccgacaucaagacccugaaguucgacgcccugagcggcagccaggagguggaguucaucggguacggcaaggccacgcucgagugccagguccagaccgcgguggacuucgggaacuccuacaucgccgagauggagaccgagagcuggaucguggaccggcagugggcccaggaccugacccugcccuggcaguccggcagcggcggggucuggcgcgagaugcaccaccucguggaguucgagcccccgcacgccgccacgauccgggugcuggcgcugggcaaccaggaggggucccucaagaccgcccugaccggcgccaugcgcgucaccaaggacacgaacgacaacaaccuguacaagcuccacgggggccacgugagcugccgggugaagcuguccgcccugacccucaagggcaccagcuacaagaucugcaccgacaagauguucuucgucaagaaccccacggacaccgggcacggcaccguggugaugcaggucaagguguccaagggggcgcccugccgcaucccggugaucgucgccgacgaccugaccgccgccaucaacaagggcauccuggugaccgugaacccgaucgccagcacgaacgacgacgagguccucaucgaggugaacccccccuucggcgacuccuacaucaucguggggcggggcgacagccgccugaccuaccaguggcacaaggagggguccagcaucggcagcacccuggggaaggccuucuccaccacgcucaagggcgcccagcgccuggcggcccugggggacaccgccugggacuucggcagcaucgggggcguguucaacuccaucggccgggccguccaccagguguucgggggcgccuuccgcacccucuucgggggcaugagcuggaucacccaggggcugaugggcgcgcugcuccuguggaugggggugaacgcccgggaccgcuccaucgcccuggccuuccucgcgacgggcggcguccugguguuccuggccaccaacgugcacgccugaggacuagugcaucacauuuaaaagcaucucagccuaccaugagaauaagagaaagaaaaugaagaucaauagcuuauucaucucuuuuucuuuuucguugguguaaagccaacacccugucuaaaaaacauaaauuucuuuaaucauuuugccucuuuucucugugcuucaauuaauaaaaaauggaaagaaccuagaucuaaaaaaaaaaaaaaaaaaaaaaaaaaaaaaaaaaaaaaaaaaaaaaaaaaaaaaaaaaaaaaaaugcaucccccccccccccccccccccccccccccccaaaggcucuuuucagagccaccagaauu

SEQ ID NO: 2014 - RNA, 2435 nt, Artificial Sequence
  mRNA product Design i-2 comprising derived and/or modified sequence from YFV__NC_002031.1__SSjev(V3)-prMEdelstem_TM-JEV (polyprotein: aa122-681) (opt1)
gggagaggcgcugccuacggagguggcagccaucuccuucucggcaucaagcuuaccaugaacgagggcagcaucauguggcuggccucccucgccguggucaucgcgugcgccggggccgugacgcuggugcggaagaaccgcuggcuccugcugaacgucaccuccgaggaccucggcaagaccuucagcguggggaccggcaacugcacgaccaacauccuggaggccaaguacuggugccccgacuccauggaguacaacugcccgaaccugagcccccgggaggagcccgacgacaucgacugcuggugcuacggcguggagaacguccgcguggccuacgggaagugcgacuccgcgggccggagccgccggucccgccgggccaucgaccuccccacccacgagaaccacgggcugaagacccgccaggagaaguggaugacgggccggaugggggagcgccagcugcagaagaucgagcggugguucgugcgcaacccguucuucgccgucaccgcccucaccaucgccuaccuggugggcagcaacaugacccagcggguggucaucgcgcugcucgugcuggccgugggccccgccuacuccgcccacugcaucgggaucacggaccgcgacuucaucgagggcguccacgggggcaccugggugagcgcgacccuggagcaggacaagugcgugaccgucauggcccccgacaagcccucccucgacaucagccuggagacgguggccaucgaccggccggccgaggugcgcaaggucugcuacaacgccgugcugacccacgugaagaucaacgacaagugccccuccaccggcgaggcgcaccucgccgaggagaacgagggggacaacgccugcaagcggaccuacagcgaccggggcugggggaacggcugcgggcuguucggcaagggcuccaucgucgccugcgccaaguucacgugcgcgaagagcaugucccuguucgagguggaccagaccaagauccaguacgucauccgcgcccagcuccacgugggggccaagcaggagaacuggaacaccgacaucaagacccugaaguucgacgcccugagcggcagccaggagguggaguucaucggguacggcaaggccacgcucgagugccagguccagaccgcgguggacuucgggaacuccuacaucgccgagauggagaccgagagcuggaucguggaccggcagugggcccaggaccugacccugcccuggcaguccggcagcggcggggucuggcgcgagaugcaccaccucguggaguucgagcccccgcacgccgccacgauccgggugcuggcgcugggcaaccaggaggggucccucaagaccgcccugaccggcgccaugcgcgucaccaaggacacgaacgacaacaaccuguacaagcuccacgggggccacgugagcugccgggugaagcuguccgcccugacccucaagggcaccagcuacaagaucugcaccgacaagauguucuucgucaagaaccccacggacaccgggcacggcaccguggugaugcaggucaagguguccaagggggcgcccugccgcaucccggugaucgucgccgacgaccugaccgccgccaucaacaagggcauccuggugaccgugaacccgaucgccagcacgaacgacgacgagguccucaucgaggugaacccccccuucggcgacuccuacaucaucguggggcggggcgacagccgccugaccuaccaguggcacaaggagggguccagcaucggcagcacccuggggaaggccuucuccaccacgcucaagggcgcccagcgccuggcggcccugggggacaccgccugggacuucggcagcaucgggggcguguucaacuccaucggccgggccguccaccagguguucgggggcgccuuccgcacccucuucgggggcaugagcuggaucacccaggggcugaugggcgcgcugcuccuguggaugggggugaacgcccgggaccgcuccaucgcccuggccuuccucgcgacgggcggcguccugguguuccuggccaccaacgugcacgccugaggacuagugcaucacauuuaaaagcaucucagccuaccaugagaauaagagaaagaaaaugaagaucaauagcuuauucaucucuuuuucuuuuucguugguguaaagccaacacccugucuaaaaaacauaaauuucuuuaaucauuuugccucuuuucucugugcuucaauuaauaaaaaauggaaagaaccuagaucuaaaaaaaaaaaaaaaaaaaaaaaaaaaaaaaaaaaaaaaaaaaaaaaaaaaaaaaaaaaaaaaaugcaucccccccccccccccccccccccccccccccaaaggcucuuuucagagccaccagaauu

SEQ ID NO: 2015 - RNA, 2450 nt, Artificial Sequence
  mRNA product Design i-2 comprising derived and/or modified sequence from YFV__NC_002031.1__X-SS-prME (polyprotein: aa92-778) (opt1)
gggagaggcgcugccuacggagguggcagccaucuccuucucggcaucaagcuuaccaugcggggccugagcucccgcaagcggcgcagccacgacgugcucaccguccaguuccugauccuggggaugcuccugaugaccggcggggugacgcuggugcggaagaaccgcuggcuccugcugaacgucaccuccgaggaccucggcaagaccuucagcguggggaccggcaacugcacgaccaacauccuggaggccaaguacuggugccccgacuccauggaguacaacugcccgaaccugagcccccgggaggagcccgacgacaucgacugcuggugcuacggcguggagaacguccgcguggccuacgggaagugcgacuccgcgggccggagccgccggucccgccgggccaucgaccuccccacccacgagaaccacgggcugaagacccgccaggagaaguggaugacgggccggaugggggagcgccagcugcagaagaucgagcggugguucgugcgcaacccguucuucgccgucaccgcccucaccaucgccuaccuggugggcagcaacaugacccagcggguggucaucgcgcugcucgugcuggccgugggccccgccuacuccgcccacugcaucgggaucacggaccgcgacuucaucgagggcguccacgggggcaccugggugagcgcgacccuggagcaggacaagugcgugaccgucauggcccccgacaagcccucccucgacaucagccuggagacgguggccaucgaccggccggccgaggugcgcaaggucugcuacaacgccgugcugacccacgugaagaucaacgacaagugccccuccaccggcgaggcgcaccucgccgaggagaacgagggggacaacgccugcaagcggaccuacagcgaccggggcugggggaacggcugcgggcuguucggcaagggcuccaucgucgccugcgccaaguucacgugcgcgaagagcaugucccuguucgagguggaccagaccaagauccaguacgucauccgcgcccagcuccacgugggggccaagcaggagaacuggaacaccgacaucaagacccugaaguucgacgcccugagcggcagccaggagguggaguucaucggguacggcaaggccacgcucgagugccagguccagaccgcgguggacuucgggaacuccuacaucgccgagauggagaccgagagcuggaucguggaccggcagugggcccaggaccugacccugcccuggcaguccggcagcggcggggucuggcgcgagaugcaccaccucguggaguucgagcccccgcacgccgccacgauccgggugcuggcgcugggcaaccaggaggggucccucaagaccgcccugaccggcgccaugcgcgucaccaaggacacgaacgacaacaaccuguacaagcuccacgggggccacgugagcugccgggugaagcuguccgcccugacccucaagggcaccagcuacaagaucugcaccgacaagauguucuucgucaagaaccccacggacaccgggcacggcaccguggugaugcaggucaagguguccaagggggcgcccugccgcaucccggugaucgucgccgacgaccugaccgccgccaucaacaagggcauccuggugaccgugaacccgaucgccagcacgaacgacgacgagguccucaucgaggugaacccccccuucggcgacuccuacaucaucguggggcggggcgacagccgccugaccuaccaguggcacaaggagggguccagcaucggcaagcuguucacccagaccaugaagggggucgagcggcuggcggugaugggcgacacggccugggacuucuccagcgccggcggguucuucaccuccgugggcaaggggauccacaccgucuucggcagcgccuuccaggggcucuucggcggccugaacuggaucaccaaggugaucaugggggccgugcugaucugggucggcaucaacacgcgcaacaugaccauguccaugagcaugauccucgugggggugaucaugauguuccugagccugggcgucggggcgugaggacuagugcaucacauuuaaaagcaucucagccuaccaugagaauaagagaaagaaaaugaagaucaauagcuuauucaucucuuuuucuuuuucguugguguaaagccaacacccugucuaaaaaacauaaauuucuuuaaucauuuugccucuuuucucugugcuucaauuaauaaaaaauggaaagaaccuagaucuaaaaaaaaaaaaaaaaaaaaaaaaaaaaaaaaaaaaaaaaaaaaaaaaaaaaaaaaaaaaaaaaugcaucccccccccccccccccccccccccccccccaaaggcucuuuucagagccaccagaauu

SEQ ID NO: 2016 - RNA, 2453 nt, Artificial Sequence
  mRNA product Design i-2 comprising derived and/or modified sequence from YFV__NC_002031.1__SSjev(V3)-prME-XX (polyprotein: aa122-788) (opt1)
gggagaggcgcugccuacggagguggcagccaucuccuucucggcaucaagcuuaccaugaacgagggcagcaucauguggcuggccucccucgccguggucaucgcgugcgccggggccgugacgcuggugcggaagaaccgcuggcuccugcugaacgucaccuccgaggaccucggcaagaccuucagcguggggaccggcaacugcacgaccaacauccuggaggccaaguacuggugccccgacuccauggaguacaacugcccgaaccugagcccccgggaggagcccgacgacaucgacugcuggugcuacggcguggagaacguccgcguggccuacgggaagugcgacuccgcgggccggagccgccggucccgccgggccaucgaccuccccacccacgagaaccacgggcugaagacccgccaggagaaguggaugacgggccggaugggggagcgccagcugcagaagaucgagcggugguucgugcgcaacccguucuucgccgucaccgcccucaccaucgccuaccuggugggcagcaacaugacccagcggguggucaucgcgcugcucgugcuggccgugggccccgccuacuccgcccacugcaucgggaucacggaccgcgacuucaucgagggcguccacgggggcaccugggugagcgcgacccuggagcaggacaagugcgugaccgucauggcccccgacaagcccucccucgacaucagccuggagacgguggccaucgaccggccggccgaggugcgcaaggucugcuacaacgccgugcugacccacgugaagaucaacgacaagugccccuccaccggcgaggcgcaccucgccgaggagaacgagggggacaacgccugcaagcggaccuacagcgaccggggcugggggaacggcugcgggcuguucggcaagggcuccaucgucgccugcgccaaguucacgugcgcgaagagcaugucccuguucgagguggaccagaccaagauccaguacgucauccgcgcccagcuccacgugggggccaagcaggagaacuggaacaccgacaucaagacccugaaguucgacgcccugagcggcagccaggagguggaguucaucggguacggcaaggccacgcucgagugccagguccagaccgcgguggacuucgggaacuccuacaucgccgagauggagaccgagagcuggaucguggaccggcagugggcccaggaccugacccugcccuggcaguccggcagcggcggggucuggcgcgagaugcaccaccucguggaguucgagcccccgcacgccgccacgauccgggugcuggcgcugggcaaccaggaggggucccucaagaccgcccugaccggcgccaugcgcgucaccaaggacacgaacgacaacaaccuguacaagcuccacgggggccacgugagcugccgggugaagcuguccgcccugacccucaagggcaccagcuacaagaucugcaccgacaagauguucuucgucaagaaccccacggacaccgggcacggcaccguggugaugcaggucaagguguccaagggggcgcccugccgcaucccggugaucgucgccgacgaccugaccgccgccaucaacaagggcauccuggugaccgugaacccgaucgccagcacgaacgacgacgagguccucaucgaggugaacccccccuucggcgacuccuacaucaucguggggcggggcgacagccgccugaccuaccaguggcacaaggagggguccagcaucggcaagcuguucacccagaccaugaagggggucgagcggcuggcggugaugggcgacacggccugggacuucuccagcgccggcggguucuucaccuccgugggcaaggggauccacaccgucuucggcagcgccuuccaggggcucuucggcggccugaacuggaucaccaaggugaucaugggggccgugcugaucugggucggcaucaacacgcgcaacaugaccauguccaugagcaugauccucgugggggugaucaugauguuccugagccugggcgucggggcggaccagggcugcgccaucaacuucggcaagugaggacuagugcaucacauuuaaaagcaucucagccuaccaugagaauaagagaaagaaaaugaagaucaauagcuuauucaucucuuuuucuuuuucguugguguaaagccaacacccugucuaaaaaacauaaauuucuuuaaucauuuugccucuuuucucugugcuucaauuaauaaaaaauggaaagaaccuagaucuaaaaaaaaaaaaaaaaaaaaaaaaaaaaaaaaaaaaaaaaaaaaaaaaaaaaaaaaaaaaaaaaugcaucccccccccccccccccccccccccccccccaaaggcucuuuucagagccaccagaauu

SEQ ID NO: 2017 - RNA, 2462 nt, Artificial Sequence
  mRNA product Design i-2 comprising derived and/or modified sequence from YFV__NC_002031.1__X-SS-prMEdelstem_TM-JEV (polyprotein: aa92-681) (opt1)
gggagaggcgcugccuacggagguggcagccaucuccuucucggcaucaagcuuaccaugcggggccugagcucccgcaagcggcgcagccacgacgugcucaccguccaguuccugauccuggggaugcuccugaugaccggcggggugacgcuggugcggaagaaccgcuggcuccugcugaacgucaccuccgaggaccucggcaagaccuucagcguggggaccggcaacugcacgaccaacauccuggaggccaaguacuggugccccgacuccauggaguacaacugcccgaaccugagcccccgggaggagcccgacgacaucgacugcuggugcuacggcguggagaacguccgcguggccuacgggaagugcgacuccgcgggccggagccgccggucccgccgggccaucgaccuccccacccacgagaaccacgggcugaagacccgccaggagaaguggaugacgggccggaugggggagcgccagcugcagaagaucgagcggugguucgugcgcaacccguucuucgccgucaccgcccucaccaucgccuaccuggugggcagcaacaugacccagcggguggucaucgcgcugcucgugcuggccgugggccccgccuacuccgcccacugcaucgggaucacggaccgcgacuucaucgagggcguccacgggggcaccugggugagcgcgacccuggagcaggacaagugcgugaccgucauggcccccgacaagcccucccucgacaucagccuggagacgguggccaucgaccggccggccgaggugcgcaaggucugcuacaacgccgugcugacccacgugaagaucaacgacaagugccccuccaccggcgaggcgcaccucgccgaggagaacgagggggacaacgccugcaagcggaccuacagcgaccggggcugggggaacggcugcgggcuguucggcaagggcuccaucgucgccugcgccaaguucacgugcgcgaaguccaugagccuguucgagguggaccagaccaagauccaguacgucauccgcgcccagcuccacgugggggccaagcaggagaacuggaacaccgacaucaagacccugaaguucgacgcccugagcggcagccaggagguggaguucaucggguacggcaaggccacgcucgagugccagguccagaccgcgguggacuucgggaacuccuacaucgccgagauggagaccgagagcuggaucguggaccggcagugggcccaggaccugacccugcccuggcaguccggcagcggcggggucuggcgcgagaugcaccaccucguggaguucgagcccccgcacgccgccacgauccgggugcuggcgcugggcaaccaggaggggucccucaagaccgcccugaccggcgccaugcgcgucaccaaggacacgaacgacaacaaccuguacaagcuccacgggggccacgugagcugccgggugaagcuguccgcccugacccucaagggcaccagcuacaagaucugcaccgacaagauguucuucgucaagaaccccacggacaccgggcacggcaccguggugaugcaggucaagguguccaagggggcgcccugccgcaucccggugaucgucgccgacgaccugaccgccgccaucaacaagggcauccuggugaccgugaacccgaucgccagcacgaacgacgacgagguccucaucgaggugaacccccccuucggcgacuccuacaucaucguggggcggggcgacagccgccugaccuaccaguggcacaaggagggguccagcaucggcagcacccuggggaaggccuucuccaccacgcucaagggcgcccagcgccuggcggcccugggggacaccgccugggacuucggcagcaucgggggcguguucaacuccaucggccgggccguccaccagguguucgggggcgccuuccgcacccucuucgggggcaugagcuggaucacccaggggcugaugggcgcgcugcuccuguggaugggggugaacgcccgggaccgcuccaucgcccuggccuuccucgcgacgggcggcguccugguguuccuggccaccaacgugcacgccugaggacuagugcaucacauuuaaaagcaucucagccuaccaugagaauaagagaaagaaaaugaagaucaauagcuuauucaucucuuuuucuuuuucguugguguaaagccaacacccugucuaaaaaacauaaauuucuuuaaucauuuugccucuuuucucugugcuucaauuaauaaaaaauggaaagaaccuagaucuaaaaaaaaaaaaaaaaaaaaaaaaaaaaaaaaaaaaaaaaaaaaaaaaaaaaaaaaaaaaaaaaugcaucccccccccccccccccccccccccccccccaaaggcucuuuucagagccaccagaauu

SEQ ID NO: 2018 - RNA, 2435 nt, Artificial Sequence
  mRNA product Design i-2 comprising derived and/or modified sequence from YFV__NC_002031.1__SSjev(V3)-prMEdelstem_TM-JEV (polyprotein: aa122-681) (opt1)
gggagaggcgcugccuacggagguggcagccaucuccuucucggcaucaagcuuaccaugaacgagggcagcaucauguggcuggccucccucgccguggucaucgcgugcgccggggccgugacgcuggugcggaagaaccgcuggcuccugcugaacgucaccuccgaggaccucggcaagaccuucagcguggggaccggcaacugcacgaccaacauccuggaggccaaguacuggugccccgacuccauggaguacaacugcccgaaccugagcccccgggaggagcccgacgacaucgacugcuggugcuacggcguggagaacguccgcguggccuacgggaagugcgacuccgcgggccggagccgccggucccgccgggccaucgaccuccccacccacgagaaccacgggcugaagacccgccaggagaaguggaugacgggccggaugggggagcgccagcugcagaagaucgagcggugguucgugcgcaacccguucuucgccgucaccgcccucaccaucgccuaccuggugggcagcaacaugacccagcggguggucaucgcgcugcucgugcuggccgugggccccgccuacuccgcccacugcaucgggaucacggaccgcgacuucaucgagggcguccacgggggcaccugggugagcgcgacccuggagcaggacaagugcgugaccgucauggcccccgacaagcccucccucgacaucagccuggagacgguggccaucgaccggccggccgaggugcgcaaggucugcuacaacgccgugcugacccacgugaagaucaacgacaagugccccuccaccggcgaggcgcaccucgccgaggagaacgagggggacaacgccugcaagcggaccuacagcgaccggggcugggggaacggcugcgggcuguucggcaagggcuccaucgucgccugcgccaaguucacgugcgcgaaguccaugagccuguucgagguggaccagaccaagauccaguacgucauccgcgcccagcuccacgugggggccaagcaggagaacuggaacaccgacaucaagacccugaaguucgacgcccugagcggcagccaggagguggaguucaucggguacggcaaggccacgcucgagugccagguccagaccgcgguggacuucgggaacuccuacaucgccgagauggagaccgagagcuggaucguggaccggcagugggcccaggaccugacccugcccuggcaguccggcagcggcggggucuggcgcgagaugcaccaccucguggaguucgagcccccgcacgccgccacgauccgggugcuggcgcugggcaaccaggaggggucccucaagaccgcccugaccggcgccaugcgcgucaccaaggacacgaacgacaacaaccuguacaagcuccacgggggccacgugagcugccgggugaagcuguccgcccugacccucaagggcaccagcuacaagaucugcaccgacaagauguucuucgucaagaaccccacggacaccgggcacggcaccguggugaugcaggucaagguguccaagggggcgcccugccgcaucccggugaucgucgccgacgaccugaccgccgccaucaacaagggcauccuggugaccgugaacccgaucgccagcacgaacgacgacgagguccucaucgaggugaacccccccuucggcgacuccuacaucaucguggggcggggcgacagccgccugaccuaccaguggcacaaggagggguccagcaucggcagcacccuggggaaggccuucuccaccacgcucaagggcgcccagcgccuggcggcccugggggacaccgccugggacuucggcagcaucgggggcguguucaacuccaucggccgggccguccaccagguguucgggggcgccuuccgcacccucuucgggggcaugagcuggaucacccaggggcugaugggcgcgcugcuccuguggaugggggugaacgcccgggaccgcuccaucgcccuggccuuccucgcgacgggcggcguccugguguuccuggccaccaacgugcacgccugaggacuagugcaucacauuuaaaagcaucucagccuaccaugagaauaagagaaagaaaaugaagaucaauagcuuauucaucucuuuuucuuuuucguugguguaaagccaacacccugucuaaaaaacauaaauuucuuuaaucauuuugccucuuuucucugugcuucaauuaauaaaaaauggaaagaaccuagaucuaaaaaaaaaaaaaaaaaaaaaaaaaaaaaaaaaaaaaaaaaaaaaaaaaaaaaaaaaaaaaaaaugcaucccccccccccccccccccccccccccccccaaaggcucuuuucagagccaccagaauu

SEQ ID NO: 2019 - RNA, 2450 nt, Artificial Sequence
  mRNA product Design i-2 comprising derived and/or modified sequence from YFV__NC_002031.1__X-SS-prME (polyprotein: aa92-778) (opt1)
gggagaggcgcugccuacggagguggcagccaucuccuucucggcaucaagcuuaccaugcggggccugagcucccgcaagcggcgcagccacgacgugcucaccguccaguuccugauccuggggaugcuccugaugaccggcggggugacgcuggugcggaagaaccgcuggcuccugcugaacgucaccuccgaggaccucggcaagaccuucagcguggggaccggcaacugcacgaccaacauccuggaggccaaguacuggugccccgacuccauggaguacaacugcccgaaccugagcccccgggaggagcccgacgacaucgacugcuggugcuacggcguggagaacguccgcguggccuacgggaagugcgacuccgcgggccggagccgccggucccgccgggccaucgaccuccccacccacgagaaccacgggcugaagacccgccaggagaaguggaugacgggccggaugggggagcgccagcugcagaagaucgagcggugguucgugcgcaacccguucuucgccgucaccgcccucaccaucgccuaccuggugggcagcaacaugacccagcggguggucaucgcgcugcucgugcuggccgugggccccgccuacuccgcccacugcaucgggaucacggaccgcgacuucaucgagggcguccacgggggcaccugggugagcgcgacccuggagcaggacaagugcgugaccgucauggcccccgacaagcccucccucgacaucagccuggagacgguggccaucgaccggccggccgaggugcgcaaggucugcuacaacgccgugcugacccacgugaagaucaacgacaagugccccuccaccggcgaggcgcaccucgccgaggagaacgagggggacaacgccugcaagcggaccuacagcgaccggggcugggggaacggcugcgggcuguucggcaagggcuccaucgucgccugcgccaaguucacgugcgcgaaguccaugagccuguucgagguggaccagaccaagauccaguacgucauccgcgcccagcuccacgugggggccaagcaggagaacuggaacaccgacaucaagacccugaaguucgacgcccugagcggcagccaggagguggaguucaucggguacggcaaggccacgcucgagugccagguccagaccgcgguggacuucgggaacuccuacaucgccgagauggagaccgagagcuggaucguggaccggcagugggcccaggaccugacccugcccuggcaguccggcagcggcggggucuggcgcgagaugcaccaccucguggaguucgagcccccgcacgccgccacgauccgggugcuggcgcugggcaaccaggaggggucccucaagaccgcccugaccggcgccaugcgcgucaccaaggacacgaacgacaacaaccuguacaagcuccacgggggccacgugagcugccgggugaagcuguccgcccugacccucaagggcaccagcuacaagaucugcaccgacaagauguucuucgucaagaaccccacggacaccgggcacggcaccguggugaugcaggucaagguguccaagggggcgcccugccgcaucccggugaucgucgccgacgaccugaccgccgccaucaacaagggcauccuggugaccgugaacccgaucgccagcacgaacgacgacgagguccucaucgaggugaacccccccuucggcgacuccuacaucaucguggggcggggcgacagccgccugaccuaccaguggcacaaggagggguccagcaucggcaagcuguucacccagaccaugaagggggucgagcggcuggcggugaugggcgacacggccugggacuucuccagcgccggcggguucuucaccuccgugggcaaggggauccacaccgucuucggcagcgccuuccaggggcuguucggcggccucaacuggaucaccaaggugaucaugggggccgugcugaucugggucggcaucaacacgcgcaacaugaccauguccaugagcaugauccucgugggggugaucaugauguuccugagccugggcgucggggcgugaggacuagugcaucacauuuaaaagcaucucagccuaccaugagaauaagagaaagaaaaugaagaucaauagcuuauucaucucuuuuucuuuuucguugguguaaagccaacacccugucuaaaaaacauaaauuucuuuaaucauuuugccucuuuucucugugcuucaauuaauaaaaaauggaaagaaccuagaucuaaaaaaaaaaaaaaaaaaaaaaaaaaaaaaaaaaaaaaaaaaaaaaaaaaaaaaaaaaaaaaaaugcaucccccccccccccccccccccccccccccccaaaggcucuuuucagagccaccagaauu

SEQ ID NO: 2020 - RNA, 2453 nt, Artificial Sequence
  mRNA product Design i-2 comprising derived and/or modified sequence from YFV__NC_002031.1__SSjev(V3)-prME-XX (polyprotein: aa122-788) (opt1)
gggagaggcgcugccuacggagguggcagccaucuccuucucggcaucaagcuuaccaugaacgagggcagcaucauguggcuggccucccucgccguggucaucgcgugcgccggggccgugacgcuggugcggaagaaccgcuggcuccugcugaacgucaccuccgaggaccucggcaagaccuucagcguggggaccggcaacugcacgaccaacauccuggaggccaaguacuggugccccgacuccauggaguacaacugcccgaaccugagcccccgggaggagcccgacgacaucgacugcuggugcuacggcguggagaacguccgcguggccuacgggaagugcgacuccgcgggccggagccgccggucccgccgggccaucgaccuccccacccacgagaaccacgggcugaagacccgccaggagaaguggaugacgggccggaugggggagcgccagcugcagaagaucgagcggugguucgugcgcaacccguucuucgccgucaccgcccucaccaucgccuaccuggugggcagcaacaugacccagcggguggucaucgcgcugcucgugcuggccgugggccccgccuacuccgcccacugcaucgggaucacggaccgcgacuucaucgagggcguccacgggggcaccugggugagcgcgacccuggagcaggacaagugcgugaccgucauggcccccgacaagcccucccucgacaucagccuggagacgguggccaucgaccggccggccgaggugcgcaaggucugcuacaacgccgugcugacccacgugaagaucaacgacaagugccccuccaccggcgaggcgcaccucgccgaggagaacgagggggacaacgccugcaagcggaccuacagcgaccggggcugggggaacggcugcgggcuguucggcaagggcuccaucgucgccugcgccaaguucacgugcgcgaaguccaugagccuguucgagguggaccagaccaagauccaguacgucauccgcgcccagcuccacgugggggccaagcaggagaacuggaacaccgacaucaagacccugaaguucgacgcccugagcggcagccaggagguggaguucaucggguacggcaaggccacgcucgagugccagguccagaccgcgguggacuucgggaacuccuacaucgccgagauggagaccgagagcuggaucguggaccggcagugggcccaggaccugacccugcccuggcaguccggcagcggcggggucuggcgcgagaugcaccaccucguggaguucgagcccccgcacgccgccacgauccgggugcuggcgcugggcaaccaggaggggucccucaagaccgcccugaccggcgccaugcgcgucaccaaggacacgaacgacaacaaccuguacaagcuccacgggggccacgugagcugccgggugaagcuguccgcccugacccucaagggcaccagcuacaagaucugcaccgacaagauguucuucgucaagaaccccacggacaccgggcacggcaccguggugaugcaggucaagguguccaagggggcgcccugccgcaucccggugaucgucgccgacgaccugaccgccgccaucaacaagggcauccuggugaccgugaacccgaucgccagcacgaacgacgacgagguccucaucgaggugaacccccccuucggcgacuccuacaucaucguggggcggggcgacagccgccugaccuaccaguggcacaaggagggguccagcaucggcaagcuguucacccagaccaugaagggggucgagcggcuggcggugaugggcgacacggccugggacuucuccagcgccggcggguucuucaccuccgugggcaaggggauccacaccgucuucggcagcgccuuccaggggcuguucggcggccucaacuggaucaccaaggugaucaugggggccgugcugaucugggucggcaucaacacgcgcaacaugaccauguccaugagcaugauccucgugggggugaucaugauguuccugagccugggcgucggggcggaccagggcugcgccaucaacuucggcaagugaggacuagugcaucacauuuaaaagcaucucagccuaccaugagaauaagagaaagaaaaugaagaucaauagcuuauucaucucuuuuucuuuuucguugguguaaagccaacacccugucuaaaaaacauaaauuucuuuaaucauuuugccucuuuucucugugcuucaauuaauaaaaaauggaaagaaccuagaucuaaaaaaaaaaaaaaaaaaaaaaaaaaaaaaaaaaaaaaaaaaaaaaaaaaaaaaaaaaaaaaaaugcaucccccccccccccccccccccccccccccccaaaggcucuuuucagagccaccagaauu

SEQ ID NO: 2021 - RNA, 2462 nt, Artificial Sequence
  mRNA product Design i-2 comprising derived and/or modified sequence from YFV__NC_002031.1__X-SS-prMEdelstem_TM-JEV (polyprotein: aa92-681) (opt1)
gggagaggcgcugccuacggagguggcagccaucuccuucucggcaucaagcuuaccaugcggggccugagcucccgcaagcggcgcagccacgacgugcucaccguccaguuccugauccuggggaugcuccugaugaccggcggggugacgcuggugcggaagaaccgcuggcuccugcugaacgucaccuccgaggaccucggcaagaccuucagcguggggaccggcaacugcacgaccaacauccuggaggccaaguacuggugccccgacuccauggaguacaacugccccaaccugagcccccgggaggagcccgacgacaucgacugcuggugcuacggcguggagaacguccgcguggccuacgggaagugcgacuccgcgggccggagccgccggucccgccgggccaucgaccuccccacccacgagaaccacgggcugaagacccgccaggagaaguggaugacgggccggaugggggagcgccagcugcagaagaucgagcggugguucgugcgcaacccguucuucgccgucaccgcccucaccaucgccuaccuggugggcagcaacaugacccagcggguggucaucgcgcugcucgugcuggccgugggccccgccuacuccgcccacugcaucgggaucacggaccgcgacuucaucgagggcguccacgggggcaccugggugagcgcgacccuggagcaggacaagugcgugaccgucauggcccccgacaagcccucccucgacaucagccuggagacgguggccaucgaccggccggccgaggugcgcaaggucugcuacaacgccgugcugacccacgugaagaucaacgacaagugccccuccaccggcgaggcgcaccucgccgaggagaacgagggggacaacgccugcaagcggaccuacagcgaccggggcugggggaacggcugcgggcuguucggcaagggcuccaucgucgccugcgccaaguucacgugcgcgaaguccaugagccuguucgagguggaccagaccaagauccaguacgucauccgcgcccagcuccacgugggggccaagcaggagaacuggaacaccgacaucaagacccugaaguucgacgcccugagcggcagccaggagguggaguucaucggguacggcaaggccacgcucgagugccagguccagaccgcgguggacuucgggaacuccuacaucgccgagauggagaccgagagcuggaucguggaccggcagugggcccaggaccugacccugcccuggcaguccggcagcggcggggucuggcgcgagaugcaccaccucguggaguucgagcccccgcacgccgccacgauccgggugcuggcgcugggcaaccaggaggggucccucaagaccgcccugaccggcgccaugcgcgucaccaaggacacgaacgacaacaaccuguacaagcuccacgggggccacgugagcugccgggugaagcuguccgcccugacccucaagggcaccagcuacaagaucugcaccgacaagauguucuucgucaagaaccccacggacaccgggcacggcaccguggugaugcaggucaagguguccaagggggcgcccugccgcaucccggugaucgucgccgacgaccugaccgccgccaucaacaagggcauccuggugaccgugaacccgaucgccagcacgaacgacgacgagguccucaucgaggugaacccgcccuucggcgacuccuacaucaucguggggcggggcgacagccgccugaccuaccaguggcacaaggagggguccagcaucggaagcacgcugggcaaggccuuuucaacaacuuugaagggagcucaaagacuggcagcguugggcgacacagccugggacuuuggcucuauuggaggggucuucaacuccauagguagagccguucaccaaguguuuggaggugccuucagaacacucuuugggggaaugucuuggaucacacaagggcuaaugggugcccuacugcucuggaugggcgucaacgcacgagaccgaucaauugcuuuggccuucuuagccacaggaggugugcucguguucuuagcgaccaaugugcacgccugaggacuagugcaucacauuuaaaagcaucucagccuaccaugagaauaagagaaagaaaaugaagaucaauagcuuauucaucucuuuuucuuuuucguugguguaaagccaacacccugucuaaaaaacauaaauuucuuuaaucauuuugccucuuuucucugugcuucaauuaauaaaaaauggaaagaaccuagaucuaaaaaaaaaaaaaaaaaaaaaaaaaaaaaaaaaaaaaaaaaaaaaaaaaaaaaaaaaaaaaaaaugcaucccccccccccccccccccccccccccccccaaaggcucuuuucagagccaccagaauu

SEQ ID NO: 2022 - RNA, 2435 nt, Artificial Sequence
  mRNA product Design i-2 comprising derived and/or modified sequence from YFV__NC_002031.1__SSjev(V3)-prMEdelstem_TM-JEV (polyprotein: aa122-681) (opt1)
gggagaggcgcugccuacggagguggcagccaucuccuucucggcaucaagcuuaccaugaacgagggcagcaucauguggcuggccucccucgccguggucaucgcgugcgccggggccgugacgcuggugcggaagaaccgcuggcuccugcugaacgucaccuccgaggaccucggcaagaccuucagcguggggaccggcaacugcacgaccaacauccuggaggccaaguacuggugccccgacuccauggaguacaacugccccaaccugagcccccgggaggagcccgacgacaucgacugcuggugcuacggcguggagaacguccgcguggccuacgggaagugcgacuccgcgggccggagccgccggucccgccgggccaucgaccuccccacccacgagaaccacgggcugaagacccgccaggagaaguggaugacgggccggaugggggagcgccagcugcagaagaucgagcggugguucgugcgcaacccguucuucgccgucaccgcccucaccaucgccuaccuggugggcagcaacaugacccagcggguggucaucgcgcugcucgugcuggccgugggccccgccuacuccgcccacugcaucgggaucacggaccgcgacuucaucgagggcguccacgggggcaccugggugagcgcgacccuggagcaggacaagugcgugaccgucauggcccccgacaagcccucccucgacaucagccuggagacgguggccaucgaccggccggccgaggugcgcaaggucugcuacaacgccgugcugacccacgugaagaucaacgacaagugccccuccaccggcgaggcgcaccucgccgaggagaacgagggggacaacgccugcaagcggaccuacagcgaccggggcugggggaacggcugcgggcuguucggcaagggcuccaucgucgccugcgccaaguucacgugcgcgaaguccaugagccuguucgagguggaccagaccaagauccaguacgucauccgcgcccagcuccacgugggggccaagcaggagaacuggaacaccgacaucaagacccugaaguucgacgcccugagcggcagccaggagguggaguucaucggguacggcaaggccacgcucgagugccagguccagaccgcgguggacuucgggaacuccuacaucgccgagauggagaccgagagcuggaucguggaccggcagugggcccaggaccugacccugcccuggcaguccggcagcggcggggucuggcgcgagaugcaccaccucguggaguucgagcccccgcacgccgccacgauccgggugcuggcgcugggcaaccaggaggggucccucaagaccgcccugaccggcgccaugcgcgucaccaaggacacgaacgacaacaaccuguacaagcuccacgggggccacgugagcugccgggugaagcuguccgcccugacccucaagggcaccagcuacaagaucugcaccgacaagauguucuucgucaagaaccccacggacaccgggcacggcaccguggugaugcaggucaagguguccaagggggcgcccugccgcaucccggugaucgucgccgacgaccugaccgccgccaucaacaagggcauccuggugaccgugaacccgaucgccagcacgaacgacgacgagguccucaucgaggugaacccgcccuucggcgacuccuacaucaucguggggcggggcgacagccgccugaccuaccaguggcacaaggagggguccagcaucggcagcacccuggggaaggccuucuccaccacgcucaagggcgcccagcgccuggcggcccugggggacaccgccugggacuucggcagcaucgggggcguguucaacuccaucggccgggccguccaccagguguucgggggcgccuuccgcacccucuucgggggcaugagcuggaucacccaggggcugaugggcgcgcugcuccuguggaugggggugaacgcccgggaccgcuccaucgcccuggccuuccucgcgacgggcggcguccugguguuccuggccaccaacgugcacgccugaggacuagugcaucacauuuaaaagcaucucagccuaccaugagaauaagagaaagaaaaugaagaucaauagcuuauucaucucuuuuucuuuuucguugguguaaagccaacacccugucuaaaaaacauaaauuucuuuaaucauuuugccucuuuucucugugcuucaauuaauaaaaaauggaaagaaccuagaucuaaaaaaaaaaaaaaaaaaaaaaaaaaaaaaaaaaaaaaaaaaaaaaaaaaaaaaaaaaaaaaaaugcaucccccccccccccccccccccccccccccccaaaggcucuuuucagagccaccagaauu

SEQ ID NO: 2023 - RNA, 2450 nt, Artificial Sequence
  mRNA product Design i-2 comprising derived and/or modified sequence from YFV__NC_002031.1__X-SS-prME (polyprotein: aa92-778) (opt1)
gggagaggcgcugccuacggagguggcagccaucuccuucucggcaucaagcuuaccaugcggggccugagcucccgcaagcggcgcagccacgacgugcucaccguccaguuccugauccuggggaugcuccugaugaccggcggggugacgcuggugcggaagaaccgcuggcuccugcugaacgucaccuccgaggaccucggcaagaccuucagcguggggaccggcaacugcacgaccaacauccuggaggccaaguacuggugccccgacuccauggaguacaacugccccaaccugagcccccgggaggagcccgacgacaucgacugcuggugcuacggcguggagaacguccgcguggccuacgggaagugcgacuccgcgggccggagccgccggucccgccgggccaucgaccuccccacccacgagaaccacgggcugaagacccgccaggagaaguggaugacgggccggaugggggagcgccagcugcagaagaucgagcggugguucgugcgcaacccguucuucgccgucaccgcccucaccaucgccuaccuggugggcagcaacaugacccagcggguggucaucgcgcugcucgugcuggccgugggccccgccuacuccgcccacugcaucgggaucacggaccgcgacuucaucgagggcguccacgggggcaccugggugagcgcgacccuggagcaggacaagugcgugaccgucauggcccccgacaagcccucccucgacaucagccuggagacgguggccaucgaccggccggccgaggugcgcaaggucugcuacaacgccgugcugacccacgugaagaucaacgacaagugccccuccaccggcgaggcgcaccucgccgaggagaacgagggggacaacgccugcaagcggaccuacagcgaccggggcugggggaacggcugcgggcuguucggcaagggcuccaucgucgccugcgccaaguucacgugcgcgaaguccaugagccuguucgagguggaccagaccaagauccaguacgucauccgcgcccagcuccacgugggggccaagcaggagaacuggaacaccgacaucaagacccugaaguucgacgcccugagcggcagccaggagguggaguucaucggguacggcaaggccacgcucgagugccagguccagaccgcgguggacuucgggaacuccuacaucgccgagauggagaccgagagcuggaucguggaccggcagugggcccaggaccugacccugcccuggcaguccggcagcggcggggucuggcgcgagaugcaccaccucguggaguucgagcccccgcacgccgccacgauccgggugcuggcgcugggcaaccaggaggggucccucaagaccgcccugaccggcgccaugcgcgucaccaaggacacgaacgacaacaaccuguacaagcuccacgggggccacgugagcugccgggugaagcuguccgcccugacccucaagggcaccagcuacaagaucugcaccgacaagauguucuucgucaagaaccccacggacaccgggcacggcaccguggugaugcaggucaagguguccaagggggcgcccugccgcaucccggugaucgucgccgacgaccugaccgccgccaucaacaagggcauccuggugaccgugaacccgaucgccagcacgaacgacgacgagguccucaucgaggugaacccgcccuucggcgacuccuacaucaucguggggcggggcgacagccgccugaccuaccaguggcacaaggagggguccagcaucggcaagcuguucacccagaccaugaagggggucgagcggcuggcggugaugggcgacacggccugggacuucuccagcgccggcggguucuucaccuccgugggcaaggggauccacaccgucuucggcagcgccuuccaggggcuguucggcggccucaacuggaucaccaaggugaucaugggggccgugcugaucugggucggcaucaacacgcgcaacaugaccauguccaugagcaugauccucgugggggugaucaugauguuccugagccugggcgucggggcgugaggacuagugcaucacauuuaaaagcaucucagccuaccaugagaauaagagaaagaaaaugaagaucaauagcuuauucaucucuuuuucuuuuucguugguguaaagccaacacccugucuaaaaaacauaaauuucuuuaaucauuuugccucuuuucucugugcuucaauuaauaaaaaauggaaagaaccuagaucuaaaaaaaaaaaaaaaaaaaaaaaaaaaaaaaaaaaaaaaaaaaaaaaaaaaaaaaaaaaaaaaaugcaucccccccccccccccccccccccccccccccaaaggcucuuuucagagccaccagaauu

SEQ ID NO: 2024 - RNA, 2453 nt, Artificial Sequence
  mRNA product Design i-2 comprising derived and/or modified sequence from YFV__NC_002031.1__SSjev(V3)-prME-XX (polyprotein: aa122-788) (opt1)
gggagaggcgcugccuacggagguggcagccaucuccuucucggcaucaagcuuaccaugaacgagggcagcaucauguggcuggccucccucgccguggucaucgcgugcgccggggccgugacgcuggugcggaagaaccgcuggcuccugcugaacgucaccuccgaggaccucggcaagaccuucagcguggggaccggcaacugcacgaccaacauccuggaggccaaguacuggugccccgacuccauggaguacaacugccccaaccugagcccccgggaggagcccgacgacaucgacugcuggugcuacggcguggagaacguccgcguggccuacgggaagugcgacuccgcgggccggagccgccggucccgccgggccaucgaccuccccacccacgagaaccacgggcugaagacccgccaggagaaguggaugacgggccggaugggggagcgccagcugcagaagaucgagcggugguucgugcgcaacccguucuucgccgucaccgcccucaccaucgccuaccuggugggcagcaacaugacccagcggguggucaucgcgcugcucgugcuggccgugggccccgccuacuccgcccacugcaucgggaucacggaccgcgacuucaucgagggcguccacgggggcaccugggugagcgcgacccuggagcaggacaagugcgugaccgucauggcccccgacaagcccucccucgacaucagccuggagacgguggccaucgaccggccggccgaggugcgcaaggucugcuacaacgccgugcugacccacgugaagaucaacgacaagugccccuccaccggcgaggcgcaccucgccgaggagaacgagggggacaacgccugcaagcggaccuacagcgaccggggcugggggaacggcugcgggcuguucggcaagggcuccaucgucgccugcgccaaguucacgugcgcgaaguccaugagccuguucgagguggaccagaccaagauccaguacgucauccgcgcccagcuccacgugggggccaagcaggagaacuggaacaccgacaucaagacccugaaguucgacgcccugagcggcagccaggagguggaguucaucggguacggcaaggccacgcucgagugccagguccagaccgcgguggacuucgggaacuccuacaucgccgagauggagaccgagagcuggaucguggaccggcagugggcccaggaccugacccugcccuggcaguccggcagcggcggggucuggcgcgagaugcaccaccucguggaguucgagcccccgcacgccgccacgauccgggugcuggcgcugggcaaccaggaggggucccucaagaccgcccugaccggcgccaugcgcgucaccaaggacacgaacgacaacaaccuguacaagcuccacgggggccacgugagcugccgggugaagcuguccgcccugacccucaagggcaccagcuacaagaucugcaccgacaagauguucuucgucaagaaccccacggacaccgggcacggcaccguggugaugcaggucaagguguccaagggggcgcccugccgcaucccggugaucgucgccgacgaccugaccgccgccaucaacaagggcauccuggugaccgugaacccgaucgccagcacgaacgacgacgagguccucaucgaggugaacccgcccuucggcgacuccuacaucaucguggggcggggcgacagccgccugaccuaccaguggcacaaggagggguccagcaucggcaagcuguucacccagaccaugaagggggucgagcggcuggcggugaugggcgacacggccugggacuucuccagcgccggcggguucuucaccuccgugggcaaggggauccacaccgucuucggcagcgccuuccaggggcuguucggcggccucaacuggaucaccaaggugaucaugggggccgugcugaucugggucggcaucaacacgcgcaacaugaccauguccaugagcaugauccucgugggggugaucaugauguuccugagccugggcgucggggcggaccagggcugcgccaucaacuucggcaagugaggacuagugcaucacauuuaaaagcaucucagccuaccaugagaauaagagaaagaaaaugaagaucaauagcuuauucaucucuuuuucuuuuucguugguguaaagccaacacccugucuaaaaaacauaaauuucuuuaaucauuuugccucuuuucucugugcuucaauuaauaaaaaauggaaagaaccuagaucuaaaaaaaaaaaaaaaaaaaaaaaaaaaaaaaaaaaaaaaaaaaaaaaaaaaaaaaaaaaaaaaaugcaucccccccccccccccccccccccccccccccaaaggcucuuuucagagccaccagaauu

SEQ ID NO: 2025 - RNA, 2462 nt, Artificial Sequence
  mRNA product Design i-2 comprising derived and/or modified sequence from YFV__NC_002031.1__X-SS-prMEdelstem_TM-JEV (polyprotein: aa92-681) (opt2)
gggagaggcgcugccuacggagguggcagccaucuccuucucggcaucaagcuuaccaugcgcggccucuccucccgcaagcgccgcucccacgacguccucaccguccaguuccucauccucggcaugcuccucaugaccggcggcgucacccucguccgcaagaaccgcuggcuccuccucaacgucaccuccgaggaccucggcaagaccuucuccgucggcaccggcaacugcaccaccaacauccucgaggccaaguacuggugccccgacuccauggaguacaacugccccaaccucuccccccgcgaggagcccgacgacaucgacugcuggugcuacggcgucgagaacguccgcgucgccuacggcaagugcgacuccgccggccgcucccgccgcucccgccgcgccaucgaccuccccacccacgagaaccacggccucaagacccgccaggagaaguggaugaccggccgcaugggcgagcgccagcuccagaagaucgagcgcugguucguccgcaaccccuucuucgccgucaccgcccucaccaucgccuaccucgucggcuccaacaugacccagcgcgucgucaucgcccuccucguccucgccgucggccccgccuacuccgcccacugcaucggcaucaccgaccgcgacuucaucgagggcguccacggcggcaccugggucuccgccacccucgagcaggacaagugcgucaccgucauggcccccgacaagcccucccucgacaucucccucgagaccgucgccaucgaccgccccgccgagguccgcaaggucugcuacaacgccguccucacccacgucaagaucaacgacaagugccccuccaccggcgaggcccaccucgccgaggagaacgagggcgacaacgccugcaagcgcaccuacuccgaccgcggcuggggcaacggcugcggccucuucggcaagggcuccaucgucgccugcgccaaguucaccugcgccaaguccaugucccucuucgaggucgaccagaccaagauccaguacgucauccgcgcccagcuccacgucggcgccaagcaggagaacuggaacaccgacaucaagacccucaaguucgacgcccucuccggcucccaggaggucgaguucaucggcuacggcaaggccacccucgagugccagguccagaccgccgucgacuucggcaacuccuacaucgccgagauggagaccgaguccuggaucgucgaccgccagugggcccaggaccucacccuccccuggcaguccggcuccggcggcgucuggcgcgagaugcaccaccucgucgaguucgagcccccccacgccgccaccauccgcguccucgcccucggcaaccaggagggcucccucaagaccgcccucaccggcgccaugcgcgucaccaaggacaccaacgacaacaaccucuacaagcuccacggcggccacgucuccugccgcgucaagcucuccgcccucacccucaagggcaccuccuacaagaucugcaccgacaagauguucuucgucaagaaccccaccgacaccggccacggcaccgucgucaugcaggucaaggucuccaagggcgcccccugccgcauccccgucaucgucgccgacgaccucaccgccgccaucaacaagggcauccucgucaccgucaaccccaucgccuccaccaacgacgacgagguccucaucgaggucaacccccccuucggcgacuccuacaucaucgucggccgcggcgacucccgccucaccuaccaguggcacaaggagggcuccuccaucggcuccacccucggcaaggccuucuccaccacccucaagggcgcccagcgccucgccgcccucggcgacaccgccugggacuucggcuccaucggcggcgucuucaacuccaucggccgcgccguccaccaggucuucggcggcgccuuccgcacccucuucggcggcauguccuggaucacccagggccucaugggcgcccuccuccucuggaugggcgucaacgcccgcgaccgcuccaucgcccucgccuuccucgccaccggcggcguccucgucuuccucgccaccaacguccacgccugaggacuagugcaucacauuuaaaagcaucucagccuaccaugagaauaagagaaagaaaaugaagaucaauagcuuauucaucucuuuuucuuuuucguugguguaaagccaacacccugucuaaaaaacauaaauuucuuuaaucauuuugccucuuuucucugugcuucaauuaauaaaaaauggaaagaaccuagaucuaaaaaaaaaaaaaaaaaaaaaaaaaaaaaaaaaaaaaaaaaaaaaaaaaaaaaaaaaaaaaaaaugcaucccccccccccccccccccccccccccccccaaaggcucuuuucagagccaccagaauu

SEQ ID NO: 2026 - RNA, 2435 nt, Artificial Sequence
  mRNA product Design i-2 comprising derived and/or modified sequence from YFV__NC_002031.1__SSjev(V3)-prMEdelstem_TM-JEV (polyprotein: aa122-681) (opt2)
gggagaggcgcugccuacggagguggcagccaucuccuucucggcaucaagcuuaccaugaacgagggcuccaucauguggcucgccucccucgccgucgucaucgccugcgccggcgccgucacccucguccgcaagaaccgcuggcuccuccucaacgucaccuccgaggaccucggcaagaccuucuccgucggcaccggcaacugcaccaccaacauccucgaggccaaguacuggugccccgacuccauggaguacaacugccccaaccucuccccccgcgaggagcccgacgacaucgacugcuggugcuacggcgucgagaacguccgcgucgccuacggcaagugcgacuccgccggccgcucccgccgcucccgccgcgccaucgaccuccccacccacgagaaccacggccucaagacccgccaggagaaguggaugaccggccgcaugggcgagcgccagcuccagaagaucgagcgcugguucguccgcaaccccuucuucgccgucaccgcccucaccaucgccuaccucgucggcuccaacaugacccagcgcgucgucaucgcccuccucguccucgccgucggccccgccuacuccgcccacugcaucggcaucaccgaccgcgacuucaucgagggcguccacggcggcaccugggucuccgccacccucgagcaggacaagugcgucaccgucauggcccccgacaagcccucccucgacaucucccucgagaccgucgccaucgaccgccccgccgagguccgcaaggucugcuacaacgccguccucacccacgucaagaucaacgacaagugccccuccaccggcgaggcccaccucgccgaggagaacgagggcgacaacgccugcaagcgcaccuacuccgaccgcggcuggggcaacggcugcggccucuucggcaagggcuccaucgucgccugcgccaaguucaccugcgccaaguccaugucccucuucgaggucgaccagaccaagauccaguacgucauccgcgcccagcuccacgucggcgccaagcaggagaacuggaacaccgacaucaagacccucaaguucgacgcccucuccggcucccaggaggucgaguucaucggcuacggcaaggccacccucgagugccagguccagaccgccgucgacuucggcaacuccuacaucgccgagauggagaccgaguccuggaucgucgaccgccagugggcccaggaccucacccuccccuggcaguccggcuccggcggcgucuggcgcgagaugcaccaccucgucgaguucgagcccccccacgccgccaccauccgcguccucgcccucggcaaccaggagggcucccucaagaccgcccucaccggcgccaugcgcgucaccaaggacaccaacgacaacaaccucuacaagcuccacggcggccacgucuccugccgcgucaagcucuccgcccucacccucaagggcaccuccuacaagaucugcaccgacaagauguucuucgucaagaaccccaccgacaccggccacggcaccgucgucaugcaggucaaggucuccaagggcgcccccugccgcauccccgucaucgucgccgacgaccucaccgccgccaucaacaagggcauccucgucaccgucaaccccaucgccuccaccaacgacgacgagguccucaucgaggucaacccccccuucggcgacuccuacaucaucgucggccgcggcgacucccgccucaccuaccaguggcacaaggagggcuccuccaucggcuccacccucggcaaggccuucuccaccacccucaagggcgcccagcgccucgccgcccucggcgacaccgccugggacuucggcuccaucggcggcgucuucaacuccaucggccgcgccguccaccaggucuucggcggcgccuuccgcacccucuucggcggcauguccuggaucacccagggccucaugggcgcccuccuccucuggaugggcgucaacgcccgcgaccgcuccaucgcccucgccuuccucgccaccggcggcguccucgucuuccucgccaccaacguccacgccugaggacuagugcaucacauuuaaaagcaucucagccuaccaugagaauaagagaaagaaaaugaagaucaauagcuuauucaucucuuuuucuuuuucguugguguaaagccaacacccugucuaaaaaacauaaauuucuuuaaucauuuugccucuuuucucugugcuucaauuaauaaaaaauggaaagaaccuagaucuaaaaaaaaaaaaaaaaaaaaaaaaaaaaaaaaaaaaaaaaaaaaaaaaaaaaaaaaaaaaaaaaugcaucccccccccccccccccccccccccccccccaaaggcucuuuucagagccaccagaauu

SEQ ID NO: 2027 - RNA, 2450 nt, Artificial Sequence
  mRNA product Design i-2 comprising derived and/or modified sequence from YFV__NC_002031.1__X-SS-prME (polyprotein: aa92-778) (opt2)
gggagaggcgcugccuacggagguggcagccaucuccuucucggcaucaagcuuaccaugcgcggccucuccucccgcaagcgccgcucccacgacguccucaccguccaguuccucauccucggcaugcuccucaugaccggcggcgucacccucguccgcaagaaccgcuggcuccuccucaacgucaccuccgaggaccucggcaagaccuucuccgucggcaccggcaacugcaccaccaacauccucgaggccaaguacuggugccccgacuccauggaguacaacugccccaaccucuccccccgcgaggagcccgacgacaucgacugcuggugcuacggcgucgagaacguccgcgucgccuacggcaagugcgacuccgccggccgcucccgccgcucccgccgcgccaucgaccuccccacccacgagaaccacggccucaagacccgccaggagaaguggaugaccggccgcaugggcgagcgccagcuccagaagaucgagcgcugguucguccgcaaccccuucuucgccgucaccgcccucaccaucgccuaccucgucggcuccaacaugacccagcgcgucgucaucgcccuccucguccucgccgucggccccgccuacuccgcccacugcaucggcaucaccgaccgcgacuucaucgagggcguccacggcggcaccugggucuccgccacccucgagcaggacaagugcgucaccgucauggcccccgacaagcccucccucgacaucucccucgagaccgucgccaucgaccgccccgccgagguccgcaaggucugcuacaacgccguccucacccacgucaagaucaacgacaagugccccuccaccggcgaggcccaccucgccgaggagaacgagggcgacaacgccugcaagcgcaccuacuccgaccgcggcuggggcaacggcugcggccucuucggcaagggcuccaucgucgccugcgccaaguucaccugcgccaaguccaugucccucuucgaggucgaccagaccaagauccaguacgucauccgcgcccagcuccacgucggcgccaagcaggagaacuggaacaccgacaucaagacccucaaguucgacgcccucuccggcucccaggaggucgaguucaucggcuacggcaaggccacccucgagugccagguccagaccgccgucgacuucggcaacuccuacaucgccgagauggagaccgaguccuggaucgucgaccgccagugggcccaggaccucacccuccccuggcaguccggcuccggcggcgucuggcgcgagaugcaccaccucgucgaguucgagcccccccacgccgccaccauccgcguccucgcccucggcaaccaggagggcucccucaagaccgcccucaccggcgccaugcgcgucaccaaggacaccaacgacaacaaccucuacaagcuccacggcggccacgucuccugccgcgucaagcucuccgcccucacccucaagggcaccuccuacaagaucugcaccgacaagauguucuucgucaagaaccccaccgacaccggccacggcaccgucgucaugcaggucaaggucuccaagggcgcccccugccgcauccccgucaucgucgccgacgaccucaccgccgccaucaacaagggcauccucgucaccgucaaccccaucgccuccaccaacgacgacgagguccucaucgaggucaacccccccuucggcgacuccuacaucaucgucggccgcggcgacucccgccucaccuaccaguggcacaaggagggcuccuccaucggcaagcucuucacccagaccaugaagggcgucgagcgccucgccgucaugggcgacaccgccugggacuucuccuccgccggcggcuucuucaccuccgucggcaagggcauccacaccgucuucggcuccgccuuccagggccucuucggcggccucaacuggaucaccaaggucaucaugggcgccguccucaucugggucggcaucaacacccgcaacaugaccauguccauguccaugauccucgucggcgucaucaugauguuccucucccucggcgucggcgccugaggacuagugcaucacauuuaaaagcaucucagccuaccaugagaauaagagaaagaaaaugaagaucaauagcuuauucaucucuuuuucuuuuucguugguguaaagccaacacccugucuaaaaaacauaaauuucuuuaaucauuuugccucuuuucucugugcuucaauuaauaaaaaauggaaagaaccuagaucuaaaaaaaaaaaaaaaaaaaaaaaaaaaaaaaaaaaaaaaaaaaaaaaaaaaaaaaaaaaaaaaaugcaucccccccccccccccccccccccccccccccaaaggcucuuuucagagccaccagaauu

SEQ ID NO: 2028 - RNA, 2453 nt, Artificial Sequence
  mRNA product Design i-2 comprising derived and/or modified sequence from YFV__NC_002031.1__SSjev(V3)-prME-XX (polyprotein: aa122-788) (opt2)
gggagaggcgcugccuacggagguggcagccaucuccuucucggcaucaagcuuaccaugaacgagggcuccaucauguggcucgccucccucgccgucgucaucgccugcgccggcgccgucacccucguccgcaagaaccgcuggcuccuccucaacgucaccuccgaggaccucggcaagaccuucuccgucggcaccggcaacugcaccaccaacauccucgaggccaaguacuggugccccgacuccauggaguacaacugccccaaccucuccccccgcgaggagcccgacgacaucgacugcuggugcuacggcgucgagaacguccgcgucgccuacggcaagugcgacuccgccggccgcucccgccgcucccgccgcgccaucgaccuccccacccacgagaaccacggccucaagacccgccaggagaaguggaugaccggccgcaugggcgagcgccagcuccagaagaucgagcgcugguucguccgcaaccccuucuucgccgucaccgcccucaccaucgccuaccucgucggcuccaacaugacccagcgcgucgucaucgcccuccucguccucgccgucggccccgccuacuccgcccacugcaucggcaucaccgaccgcgacuucaucgagggcguccacggcggcaccugggucuccgccacccucgagcaggacaagugcgucaccgucauggcccccgacaagcccucccucgacaucucccucgagaccgucgccaucgaccgccccgccgagguccgcaaggucugcuacaacgccguccucacccacgucaagaucaacgacaagugccccuccaccggcgaggcccaccucgccgaggagaacgagggcgacaacgccugcaagcgcaccuacuccgaccgcggcuggggcaacggcugcggccucuucggcaagggcuccaucgucgccugcgccaaguucaccugcgccaaguccaugucccucuucgaggucgaccagaccaagauccaguacgucauccgcgcccagcuccacgucggcgccaagcaggagaacuggaacaccgacaucaagacccucaaguucgacgcccucuccggcucccaggaggucgaguucaucggcuacggcaaggccacccucgagugccagguccagaccgccgucgacuucggcaacuccuacaucgccgagauggagaccgaguccuggaucgucgaccgccagugggcccaggaccucacccuccccuggcaguccggcuccggcggcgucuggcgcgagaugcaccaccucgucgaguucgagcccccccacgccgccaccauccgcguccucgcccucggcaaccaggagggcucccucaagaccgcccucaccggcgccaugcgcgucaccaaggacaccaacgacaacaaccucuacaagcuccacggcggccacgucuccugccgcgucaagcucuccgcccucacccucaagggcaccuccuacaagaucugcaccgacaagauguucuucgucaagaaccccaccgacaccggccacggcaccgucgucaugcaggucaaggucuccaagggcgcccccugccgcauccccgucaucgucgccgacgaccucaccgccgccaucaacaagggcauccucgucaccgucaaccccaucgccuccaccaacgacgacgagguccucaucgaggucaacccccccuucggcgacuccuacaucaucgucggccgcggcgacucccgccucaccuaccaguggcacaaggagggcuccuccaucggcaagcucuucacccagaccaugaagggcgucgagcgccucgccgucaugggcgacaccgccugggacuucuccuccgccggcggcuucuucaccuccgucggcaagggcauccacaccgucuucggcuccgccuuccagggccucuucggcggccucaacuggaucaccaaggucaucaugggcgccguccucaucugggucggcaucaacacccgcaacaugaccauguccauguccaugauccucgucggcgucaucaugauguuccucucccucggcgucggcgccgaccagggcugcgccaucaacuucggcaagugaggacuagugcaucacauuuaaaagcaucucagccuaccaugagaauaagagaaagaaaaugaagaucaauagcuuauucaucucuuuuucuuuuucguugguguaaagccaacacccugucuaaaaaacauaaauuucuuuaaucauuuugccucuuuucucugugcuucaauuaauaaaaaauggaaagaaccuagaucuaaaaaaaaaaaaaaaaaaaaaaaaaaaaaaaaaaaaaaaaaaaaaaaaaaaaaaaaaaaaaaaaugcaucccccccccccccccccccccccccccccccaaaggcucuuuucagagccaccagaauu

SEQ ID NO: 2029 - RNA, 2462 nt, Artificial Sequence
  mRNA product Design i-2 comprising derived and/or modified sequence from YFV__NC_002031.1__X-SS-prMEdelstem_TM-JEV (polyprotein: aa92-681) (opt3)
gggagaggcgcugccuacggagguggcagccaucuccuucucggcaucaagcuuaccaugagaggccugagcuccaggaagcggcgcucucacgacgugcucaccguccaguuccuuauccuggggauguuguuaaugacaggagguguuacucuggugcguaaaaaccgauggcuacuccugaauguaacgucagaggaucuuggcaagaccuuuaguguggggacaggaaacugcacuaccaauauucuggaagccaaauacuggugucccgacagcauggaguauaacugcccuaauuuguccccaagagaggaaccggaugacauagauuguuggugcuacggcgucgaaaacgugaggguugcuuaugguaagugugacucugcagggcggucgcgcagaucaaggcgggccaucgaucuccccacacaugagaaucacggacugaaaacccgccaagagaaguggaugacuggccgaaugggcgaaagacagcugcagaagauugagaggugguucgugcggaacccuuucuucgcggucacagcucucaccaucgccuacuuaguggggagcaauaugacgcagcguguaguuauugcacugcuuguguuggccgucggaccagcuuauagugcacauugcaucgguauaacugaccgcgauuuuaucgaaggcgugcacgggggaaccuggguguccgccacacuggagcaagacaaaugugucacuguuauggcucccgauaagccuucucuagacauuagccucgagaccguggccaucgauagaccagcggaaguaaggaaagugugcuacaacgcaguccugacacaugugaagauuaaugacaaaugucccuccaccggcgaggcccaccuugcugaagagaacgaaggugacaaugccugcaagcggacguauucagaucgaggguggggaaacggcuguggccuguucgggaagggaaguaucguugcaugcgcuaaauuuacuugcgccaagagcaugucuuuguucgagguggaccagacaaaaauacaguacgucauucgcgcgcagcuccacgugggugccaagcaagagaauuggaacaccgauaucaaaacucugaaguuugacgcauuauccggcucacaggaaguagaguucauuggguacggaaaagcuacacuggaaugucagguucagaccgccguggauuuuggcaacagcuauaucgcugagauggaaacggagaguuggaucgucgacagacaaugggcccaggaucucacccuuccuuggcagucugguuccgggggcguguggagggagaugcaucaccuggucgaauuugagccaccgcaugcagccacaauucggguguuggcucuaggaaaucaagaaggcagccugaagacugcgcucaccggggcaaugcgcguuacaaaggacacuaacgauaauaaccuguacaaacuucacggaggucacgugucgugcagaguaaagcugucugccuugacccucaaaggcacauccuauaagauauguaccgacaaaauguuuuucgucaagaaucccacugauacggggcauggaacagugguuaugcaagugaaggucucaaaaggcgcuccuugcaggaucccagugauuguagccgacgaccugaccgcagccaucaacaaggguauauuagugacuguuaaucccauugcuaguaccaacgaugacgagguccugaucgaagugaauccuccauucggggauagcuacaucauugugggccguggagacucccggcuaacauaucaguggcacaaagagggcucuagcaucggcagcacccuggggaaggccuucuccacaacucucaaaggagcucagagacuugcagcccugggugacacggcgugggauuuuggcucuaucgggggaguguucaacucaauuggcagggcuguccaccaaguuuuugguggggccuuccggaccuuguuuggaggcaugaguuggauaacacagggcuuaaugggggcacugcuacucuggaugggagugaaugcccgcgaccgaagcaucgcucuggcauuccuugccacugguggcguacugguguuuuuggcuaccaacguccaugccugaggacuagugcaucacauuuaaaagcaucucagccuaccaugagaauaagagaaagaaaaugaagaucaauagcuuauucaucucuuuuucuuuuucguugguguaaagccaacacccugucuaaaaaacauaaauuucuuuaaucauuuugccucuuuucucugugcuucaauuaauaaaaaauggaaagaaccuagaucuaaaaaaaaaaaaaaaaaaaaaaaaaaaaaaaaaaaaaaaaaaaaaaaaaaaaaaaaaaaaaaaaugcaucccccccccccccccccccccccccccccccaaaggcucuuuucagagccaccagaauu

SEQ ID NO: 2030 - RNA, 2435 nt, Artificial Sequence
  mRNA product Design i-2 comprising derived and/or modified sequence from YFV__NC_002031.1__SSjev(V3)-prMEdelstem_TM-JEV (polyprotein: aa122-681) (opt3)
gggagaggcgcugccuacggagguggcagccaucuccuucucggcaucaagcuuaccaugaacgagggcagcaucauguggcuggccucccucgcuguggucauugcaugcgccggggcgguuacucuggugcguaaaaaccgauggcuacuccugaauguaacgucagaggaucuuggcaagaccuuuaguguggggacaggaaacugcacuaccaauauucuggaagccaaauacuggugucccgacagcauggaguauaacugcccuaauuuguccccaagagaggaaccggaugacauagauuguuggugcuacggcgucgaaaacgugaggguugcuuaugguaagugugacucugcagggcggucgcgcagaucaaggcgggccaucgaucuccccacacaugagaaucacggacugaaaacccgccaagagaaguggaugacuggccgaaugggcgaaagacagcugcagaagauugagaggugguucgugcggaacccuuucuucgcggucacagcucucaccaucgccuacuuaguggggagcaauaugacgcagcguguaguuauugcacugcuuguguuggccgucggaccagcuuauagugcacauugcaucgguauaacugaccgcgauuuuaucgaaggcgugcacgggggaaccuggguguccgccacacuggagcaagacaaaugugucacuguuauggcucccgauaagccuucucuagacauuagccucgagaccguggccaucgauagaccagcggaaguaaggaaagugugcuacaacgcaguccugacacaugugaagauuaaugacaaaugucccuccaccggcgaggcccaccuugcugaagagaacgaaggugacaaugccugcaagcggacguauucagaucgaggguggggaaacggcuguggccuguucgggaagggaaguaucguugcaugcgcuaaauuuacuugcgccaagagcaugucuuuguucgagguggaccagacaaaaauacaguacgucauucgcgcgcagcuccacgugggugccaagcaagagaauuggaacaccgauaucaaaacucugaaguuugacgcauuauccggcucacaggaaguagaguucauuggguacggaaaagcuacacuggaaugucagguucagaccgccguggauuuuggcaacagcuauaucgcugagauggaaacggagaguuggaucgucgacagacaaugggcccaggaucucacccuuccuuggcagucugguuccgggggcguguggagggagaugcaucaccuggucgaauuugagccaccgcaugcagccacaauucggguguuggcucuaggaaaucaagaaggcagccugaagacugcgcucaccggggcaaugcgcguuacaaaggacacuaacgauaauaaccuguacaaacuucacggaggucacgugucgugcagaguaaagcugucugccuugacccucaaaggcacauccuauaagauauguaccgacaaaauguuuuucgucaagaaucccacugauacggggcauggaacagugguuaugcaagugaaggucucaaaaggcgcuccuugcaggaucccagugauuguagccgacgaccugaccgcagccaucaacaaggguauauuagugacuguuaaucccauugcuaguaccaacgaugacgagguccugaucgaagugaauccuccauucggggauagcuacaucauugugggccguggagacucccggcuaacauaucaguggcacaaagagggcucuagcaucggcagcacccuggggaaggccuucuccacaacucucaaaggagcucagagacuugcagcccugggugacacggcgugggauuuuggcucuaucgggggaguguucaacucaauuggcagggcuguccaccaaguuuuugguggggccuuccggaccuuguuuggaggcaugaguuggauaacacagggcuuaaugggggcacugcuacucuggaugggagugaaugcccgcgaccgaagcaucgcucuggcauuccuugccacugguggcguacugguguuuuuggcuaccaacguccaugccugaggacuagugcaucacauuuaaaagcaucucagccuaccaugagaauaagagaaagaaaaugaagaucaauagcuuauucaucucuuuuucuuuuucguugguguaaagccaacacccugucuaaaaaacauaaauuucuuuaaucauuuugccucuuuucucugugcuucaauuaauaaaaaauggaaagaaccuagaucuaaaaaaaaaaaaaaaaaaaaaaaaaaaaaaaaaaaaaaaaaaaaaaaaaaaaaaaaaaaaaaaaugcaucccccccccccccccccccccccccccccccaaaggcucuuuucagagccaccagaauu

SEQ ID NO: 2031 - RNA, 2450 nt, Artificial Sequence
  mRNA product Design i-2 comprising derived and/or modified sequence from YFV__NC_002031.1__X-SS-prME (polyprotein: aa92-778) (opt3)
gggagaggcgcugccuacggagguggcagccaucuccuucucggcaucaagcuuaccaugagaggccugagcuccaggaagcggcgcucucacgacgugcucaccguccaguuccuuauccuggggauguuguuaaugacaggagguguuacucuggugcguaaaaaccgauggcuacuccugaauguaacgucagaggaucuuggcaagaccuuuaguguggggacaggaaacugcacuaccaauauucuggaagccaaauacuggugucccgacagcauggaguauaacugcccuaauuuguccccaagagaggaaccggaugacauagauuguuggugcuacggcgucgaaaacgugaggguugcuuaugguaagugugacucugcagggcggucgcgcagaucaaggcgggccaucgaucuccccacacaugagaaucacggacugaaaacccgccaagagaaguggaugacuggccgaaugggcgaaagacagcugcagaagauugagaggugguucgugcggaacccuuucuucgcggucacagcucucaccaucgccuacuuaguggggagcaauaugacgcagcguguaguuauugcacugcuuguguuggccgucggaccagcuuauagugcacauugcaucgguauaacugaccgcgauuuuaucgaaggcgugcacgggggaaccuggguguccgccacacuggagcaagacaaaugugucacuguuauggcucccgauaagccuucucuagacauuagccucgagaccguggccaucgauagaccagcggaaguaaggaaagugugcuacaacgcaguccugacacaugugaagauuaaugacaaaugucccuccaccggcgaggcccaccuugcugaagagaacgaaggugacaaugccugcaagcggacguauucagaucgaggguggggaaacggcuguggccuguucgggaagggaaguaucguugcaugcgcuaaauuuacuugcgccaagagcaugucuuuguucgagguggaccagacaaaaauacaguacgucauucgcgcgcagcuccacgugggugccaagcaagagaauuggaacaccgauaucaaaacucugaaguuugacgcauuauccggcucacaggaaguagaguucauuggguacggaaaagcuacacuggaaugucagguucagaccgccguggauuuuggcaacagcuauaucgcugagauggaaacggagaguuggaucgucgacagacaaugggcccaggaucucacccuuccuuggcagucugguuccgggggcguguggagggagaugcaucaccuggucgaauuugagccaccgcaugcagccacaauucggguguuggcucuaggaaaucaagaaggcagccugaagacugcgcucaccggggcaaugcgcguuacaaaggacacuaacgauaauaaccuguacaaacuucacggaggucacgugucgugcagaguaaagcugucugccuugacccucaaaggcacauccuauaagauauguaccgacaaaauguuuuucgucaagaaucccacugauacggggcauggaacagugguuaugcaagugaaggucucaaaaggcgcuccuugcaggaucccagugauuguagccgacgaccugaccgcagccaucaacaaggguauauuagugacuguuaaucccauugcuaguaccaacgaugacgagguccugaucgaagugaauccuccauucggggauagcuacaucauugugggccguggagacucccggcuaacauaucaguggcacaaagagggcucuagcaucgggaagcucuuuacccagacuaugaaaggagucgagcgacuggccguuaugggugauacagcaugggacuucucaagugcgggcggguuuuucacguccgugggaaagggcauucauaccguguuugguagcgcuuuccaggggcuuuuuggcggauugaacuggauaacuaagguaaucaugggcgccguccugauuuggguggggaucaauacaagaaacaugaccaugucuaugucaaugauccucguuggagugauuaugauguuccugagucuuggcgucggugcaugaggacuagugcaucacauuuaaaagcaucucagccuaccaugagaauaagagaaagaaaaugaagaucaauagcuuauucaucucuuuuucuuuuucguugguguaaagccaacacccugucuaaaaaacauaaauuucuuuaaucauuuugccucuuuucucugugcuucaauuaauaaaaaauggaaagaaccuagaucuaaaaaaaaaaaaaaaaaaaaaaaaaaaaaaaaaaaaaaaaaaaaaaaaaaaaaaaaaaaaaaaaugcaucccccccccccccccccccccccccccccccaaaggcucuuuucagagccaccagaauu

SEQ ID NO: 2032 - RNA, 2453 nt, Artificial Sequence
  mRNA product Design i-2 comprising derived and/or modified sequence from YFV__NC_002031.1__SSjev(V3)-prME-XX (polyprotein: aa122-788) (opt3)
gggagaggcgcugccuacggagguggcagccaucuccuucucggcaucaagcuuaccaugaacgagggcagcaucauguggcuggccucccucgcuguggucauugcaugcgccggggcgguuacucuggugcguaaaaaccgauggcuacuccugaauguaacgucagaggaucuuggcaagaccuuuaguguggggacaggaaacugcacuaccaauauucuggaagccaaauacuggugucccgacagcauggaguauaacugcccuaauuuguccccaagagaggaaccggaugacauagauuguuggugcuacggcgucgaaaacgugaggguugcuuaugguaagugugacucugcagggcggucgcgcagaucaaggcgggccaucgaucuccccacacaugagaaucacggacugaaaacccgccaagagaaguggaugacuggccgaaugggcgaaagacagcugcagaagauugagaggugguucgugcggaacccuuucuucgcggucacagcucucaccaucgccuacuuaguggggagcaauaugacgcagcguguaguuauugcacugcuuguguuggccgucggaccagcuuauagugcacauugcaucgguauaacugaccgcgauuuuaucgaaggcgugcacgggggaaccuggguguccgccacacuggagcaagacaaaugugucacuguuauggcucccgauaagccuucucuagacauuagccucgagaccguggccaucgauagaccagcggaaguaaggaaagugugcuacaacgcaguccugacacaugugaagauuaaugacaaaugucccuccaccggcgaggcccaccuugcugaagagaacgaaggugacaaugccugcaagcggacguauucagaucgaggguggggaaacggcuguggccuguucgggaagggaaguaucguugcaugcgcuaaauuuacuugcgccaagagcaugucuuuguucgagguggaccagacaaaaauacaguacgucauucgcgcgcagcuccacgugggugccaagcaagagaauuggaacaccgauaucaaaacucugaaguuugacgcauuauccggcucacaggaaguagaguucauuggguacggaaaagcuacacuggaaugucagguucagaccgccguggauuuuggcaacagcuauaucgcugagauggaaacggagaguuggaucgucgacagacaaugggcccaggaucucacccuuccuuggcagucugguuccgggggcguguggagggagaugcaucaccuggucgaauuugagccaccgcaugcagccacaauucggguguuggcucuaggaaaucaagaaggcagccugaagacugcgcucaccggggcaaugcgcguuacaaaggacacuaacgauaauaaccuguacaaacuucacggaggucacgugucgugcagaguaaagcugucugccuugacccucaaaggcacauccuauaagauauguaccgacaaaauguuuuucgucaagaaucccacugauacggggcauggaacagugguuaugcaagugaaggucucaaaaggcgcuccuugcaggaucccagugauuguagccgacgaccugaccgcagccaucaacaaggguauauuagugacuguuaaucccauugcuaguaccaacgaugacgagguccugaucgaagugaauccuccauucggggauagcuacaucauugugggccguggagacucccggcuaacauaucaguggcacaaagagggcucuagcaucgggaagcucuuuacccagacuaugaaaggagucgagcgacuggccguuaugggugauacagcaugggacuucucaagugcgggcggguuuuucacguccgugggaaagggcauucauaccguguuugguagcgcuuuccaggggcuuuuuggcggauugaacuggauaacuaagguaaucaugggcgccguccugauuuggguggggaucaauacaagaaacaugaccaugucuaugucaaugauccucguuggagugauuaugauguuccugagucuuggcgucggugcagaucaggggugugccauaaauuuuggaaaaugaggacuagugcaucacauuuaaaagcaucucagccuaccaugagaauaagagaaagaaaaugaagaucaauagcuuauucaucucuuuuucuuuuucguugguguaaagccaacacccugucuaaaaaacauaaauuucuuuaaucauuuugccucuuuucucugugcuucaauuaauaaaaaauggaaagaaccuagaucuaaaaaaaaaaaaaaaaaaaaaaaaaaaaaaaaaaaaaaaaaaaaaaaaaaaaaaaaaaaaaaaaugcaucccccccccccccccccccccccccccccccaaaggcucuuuucagagccaccagaauu

SEQ ID NO: 2033 - RNA, 2462 nt, Artificial Sequence
  mRNA product Design i-2 comprising derived and/or modified sequence from YFV__NC_002031.1__X-SS-prMEdelstem_TM-JEV (polyprotein: aa92-681) (opt4)
gggagaggcgcugccuacggagguggcagccaucuccuucucggcaucaagcuuaccaugagaggccugagcagcagaaagagaagaagccacgacgugcugaccgugcaguuccugauccugggcaugcugcugaugaccggcggcgugacccuggugagaaagaacagauggcugcugcugaacgugaccagcgaggaccugggcaagaccuucagcgugggcaccggcaacugcaccaccaacauccuggaggccaaguacuggugccccgacagcauggaguacaacugccccaaccugagccccagagaggagcccgacgacaucgacugcuggugcuacggcguggagaacgugagaguggccuacggcaagugcgacagcgccggcagaagcagaagaagcagaagagccaucgaccugcccacccacgagaaccacggccugaagaccagacaggagaaguggaugaccggcagaaugggcgagagacagcugcagaagaucgagagaugguucgugagaaaccccuucuucgccgugaccgcccugaccaucgccuaccuggugggcagcaacaugacccagagaguggugaucgcccugcuggugcuggccgugggccccgccuacagcgcccacugcaucggcaucaccgacagagacuucaucgagggcgugcacggcggcaccugggugagcgccacccuggagcaggacaagugcgugaccgugauggcccccgacaagcccagccuggacaucagccuggagaccguggccaucgacagacccgccgaggugagaaaggugugcuacaacgccgugcugacccacgugaagaucaacgacaagugccccagcaccggcgaggcccaccuggccgaggagaacgagggcgacaacgccugcaagagaaccuacagcgacagaggcuggggcaacggcugcggccuguucggcaagggcagcaucguggccugcgccaaguucaccugcgccaagagcaugagccuguucgagguggaccagaccaagauccaguacgugaucagagcccagcugcacgugggcgccaagcaggagaacuggaacaccgacaucaagacccugaaguucgacgcccugagcggcagccaggagguggaguucaucggcuacggcaaggccacccuggagugccaggugcagaccgccguggacuucggcaacagcuacaucgccgagauggagaccgagagcuggaucguggacagacagugggcccaggaccugacccugcccuggcagagcggcagcggcggcguguggagagagaugcaccaccugguggaguucgagcccccccacgccgccaccaucagagugcuggcccugggcaaccaggagggcagccugaagaccgcccugaccggcgccaugagagugaccaaggacaccaacgacaacaaccuguacaagcugcacggcggccacgugagcugcagagugaagcugagcgcccugacccugaagggcaccagcuacaagaucugcaccgacaagauguucuucgugaagaaccccaccgacaccggccacggcaccguggugaugcaggugaaggugagcaagggcgcccccugcagaauccccgugaucguggccgacgaccugaccgccgccaucaacaagggcauccuggugaccgugaaccccaucgccagcaccaacgacgacgaggugcugaucgaggugaacccccccuucggcgacagcuacaucaucgugggcagaggcgacagcagacugaccuaccaguggcacaaggagggcagcagcaucggcagcacccugggcaaggccuucagcaccacccugaagggcgcccagagacuggccgcccugggcgacaccgccugggacuucggcagcaucggcggcguguucaacagcaucggcagagccgugcaccagguguucggcggcgccuucagaacccuguucggcggcaugagcuggaucacccagggccugaugggcgcccugcugcuguggaugggcgugaacgccagagacagaagcaucgcccuggccuuccuggccaccggcggcgugcugguguuccuggccaccaacgugcacgccugaggacuagugcaucacauuuaaaagcaucucagccuaccaugagaauaagagaaagaaaaugaagaucaauagcuuauucaucucuuuuucuuuuucguugguguaaagccaacacccugucuaaaaaacauaaauuucuuuaaucauuuugccucuuuucucugugcuucaauuaauaaaaaauggaaagaaccuagaucuaaaaaaaaaaaaaaaaaaaaaaaaaaaaaaaaaaaaaaaaaaaaaaaaaaaaaaaaaaaaaaaaugcaucccccccccccccccccccccccccccccccaaaggcucuuuucagagccaccagaauu

SEQ ID NO: 2034 - RNA, 2435 nt, Artificial Sequence
  mRNA product Design i-2 comprising derived and/or modified sequence from YFV__NC_002031.1__SSjev(V3)-prMEdelstem_TM-JEV (polyprotein: aa122-681) (opt4)
gggagaggcgcugccuacggagguggcagccaucuccuucucggcaucaagcuuaccaugaacgagggcagcaucauguggcuggccagccuggccguggugaucgccugcgccggcgccgugacccuggugagaaagaacagauggcugcugcugaacgugaccagcgaggaccugggcaagaccuucagcgugggcaccggcaacugcaccaccaacauccuggaggccaaguacuggugccccgacagcauggaguacaacugccccaaccugagccccagagaggagcccgacgacaucgacugcuggugcuacggcguggagaacgugagaguggccuacggcaagugcgacagcgccggcagaagcagaagaagcagaagagccaucgaccugcccacccacgagaaccacggccugaagaccagacaggagaaguggaugaccggcagaaugggcgagagacagcugcagaagaucgagagaugguucgugagaaaccccuucuucgccgugaccgcccugaccaucgccuaccuggugggcagcaacaugacccagagaguggugaucgcccugcuggugcuggccgugggccccgccuacagcgcccacugcaucggcaucaccgacagagacuucaucgagggcgugcacggcggcaccugggugagcgccacccuggagcaggacaagugcgugaccgugauggcccccgacaagcccagccuggacaucagccuggagaccguggccaucgacagacccgccgaggugagaaaggugugcuacaacgccgugcugacccacgugaagaucaacgacaagugccccagcaccggcgaggcccaccuggccgaggagaacgagggcgacaacgccugcaagagaaccuacagcgacagaggcuggggcaacggcugcggccuguucggcaagggcagcaucguggccugcgccaaguucaccugcgccaagagcaugagccuguucgagguggaccagaccaagauccaguacgugaucagagcccagcugcacgugggcgccaagcaggagaacuggaacaccgacaucaagacccugaaguucgacgcccugagcggcagccaggagguggaguucaucggcuacggcaaggccacccuggagugccaggugcagaccgccguggacuucggcaacagcuacaucgccgagauggagaccgagagcuggaucguggacagacagugggcccaggaccugacccugcccuggcagagcggcagcggcggcguguggagagagaugcaccaccugguggaguucgagcccccccacgccgccaccaucagagugcuggcccugggcaaccaggagggcagccugaagaccgcccugaccggcgccaugagagugaccaaggacaccaacgacaacaaccuguacaagcugcacggcggccacgugagcugcagagugaagcugagcgcccugacccugaagggcaccagcuacaagaucugcaccgacaagauguucuucgugaagaaccccaccgacaccggccacggcaccguggugaugcaggugaaggugagcaagggcgcccccugcagaauccccgugaucguggccgacgaccugaccgccgccaucaacaagggcauccuggugaccgugaaccccaucgccagcaccaacgacgacgaggugcugaucgaggugaacccccccuucggcgacagcuacaucaucgugggcagaggcgacagcagacugaccuaccaguggcacaaggagggcagcagcaucggcagcacccugggcaaggccuucagcaccacccugaagggcgcccagagacuggccgcccugggcgacaccgccugggacuucggcagcaucggcggcguguucaacagcaucggcagagccgugcaccagguguucggcggcgccuucagaacccuguucggcggcaugagcuggaucacccagggccugaugggcgcccugcugcuguggaugggcgugaacgccagagacagaagcaucgcccuggccuuccuggccaccggcggcgugcugguguuccuggccaccaacgugcacgccugaggacuagugcaucacauuuaaaagcaucucagccuaccaugagaauaagagaaagaaaaugaagaucaauagcuuauucaucucuuuuucuuuuucguugguguaaagccaacacccugucuaaaaaacauaaauuucuuuaaucauuuugccucuuuucucugugcuucaauuaauaaaaaauggaaagaaccuagaucuaaaaaaaaaaaaaaaaaaaaaaaaaaaaaaaaaaaaaaaaaaaaaaaaaaaaaaaaaaaaaaaaugcaucccccccccccccccccccccccccccccccaaaggcucuuuucagagccaccagaauu

SEQ ID NO: 2035 - RNA, 2450 nt, Artificial Sequence
  mRNA product Design i-2 comprising derived and/or modified sequence from YFV__NC_002031.1__X-SS-prME (polyprotein: aa92-778) (opt4)
gggagaggcgcugccuacggagguggcagccaucuccuucucggcaucaagcuuaccaugagaggccugagcagcagaaagagaagaagccacgacgugcugaccgugcaguuccugauccugggcaugcugcugaugaccggcggcgugacccuggugagaaagaacagauggcugcugcugaacgugaccagcgaggaccugggcaagaccuucagcgugggcaccggcaacugcaccaccaacauccuggaggccaaguacuggugccccgacagcauggaguacaacugccccaaccugagccccagagaggagcccgacgacaucgacugcuggugcuacggcguggagaacgugagaguggccuacggcaagugcgacagcgccggcagaagcagaagaagcagaagagccaucgaccugcccacccacgagaaccacggccugaagaccagacaggagaaguggaugaccggcagaaugggcgagagacagcugcagaagaucgagagaugguucgugagaaaccccuucuucgccgugaccgcccugaccaucgccuaccuggugggcagcaacaugacccagagaguggugaucgcccugcuggugcuggccgugggccccgccuacagcgcccacugcaucggcaucaccgacagagacuucaucgagggcgugcacggcggcaccugggugagcgccacccuggagcaggacaagugcgugaccgugauggcccccgacaagcccagccuggacaucagccuggagaccguggccaucgacagacccgccgaggugagaaaggugugcuacaacgccgugcugacccacgugaagaucaacgacaagugccccagcaccggcgaggcccaccuggccgaggagaacgagggcgacaacgccugcaagagaaccuacagcgacagaggcuggggcaacggcugcggccuguucggcaagggcagcaucguggccugcgccaaguucaccugcgccaagagcaugagccuguucgagguggaccagaccaagauccaguacgugaucagagcccagcugcacgugggcgccaagcaggagaacuggaacaccgacaucaagacccugaaguucgacgcccugagcggcagccaggagguggaguucaucggcuacggcaaggccacccuggagugccaggugcagaccgccguggacuucggcaacagcuacaucgccgagauggagaccgagagcuggaucguggacagacagugggcccaggaccugacccugcccuggcagagcggcagcggcggcguguggagagagaugcaccaccugguggaguucgagcccccccacgccgccaccaucagagugcuggcccugggcaaccaggagggcagccugaagaccgcccugaccggcgccaugagagugaccaaggacaccaacgacaacaaccuguacaagcugcacggcggccacgugagcugcagagugaagcugagcgcccugacccugaagggcaccagcuacaagaucugcaccgacaagauguucuucgugaagaaccccaccgacaccggccacggcaccguggugaugcaggugaaggugagcaagggcgcccccugcagaauccccgugaucguggccgacgaccugaccgccgccaucaacaagggcauccuggugaccgugaaccccaucgccagcaccaacgacgacgaggugcugaucgaggugaacccccccuucggcgacagcuacaucaucgugggcagaggcgacagcagacugaccuaccaguggcacaaggagggcagcagcaucggcaagcuguucacccagaccaugaagggcguggagagacuggccgugaugggcgacaccgccugggacuucagcagcgccggcggcuucuucaccagcgugggcaagggcauccacaccguguucggcagcgccuuccagggccuguucggcggccugaacuggaucaccaaggugaucaugggcgccgugcugaucugggugggcaucaacaccagaaacaugaccaugagcaugagcaugauccuggugggcgugaucaugauguuccugagccugggcgugggcgccugaggacuagugcaucacauuuaaaagcaucucagccuaccaugagaauaagagaaagaaaaugaagaucaauagcuuauucaucucuuuuucuuuuucguugguguaaagccaacacccugucuaaaaaacauaaauuucuuuaaucauuuugccucuuuucucugugcuucaauuaauaaaaaauggaaagaaccuagaucuaaaaaaaaaaaaaaaaaaaaaaaaaaaaaaaaaaaaaaaaaaaaaaaaaaaaaaaaaaaaaaaaugcaucccccccccccccccccccccccccccccccaaaggcucuuuucagagccaccagaauu

SEQ ID NO: 2036 - RNA, 2453 nt, Artificial Sequence
  mRNA product Design i-2 comprising derived and/or modified sequence from YFV__NC_002031.1__SSjev(V3)-prME-XX (polyprotein: aa122-788) (opt4)
gggagaggcgcugccuacggagguggcagccaucuccuucucggcaucaagcuuaccaugaacgagggcagcaucauguggcuggccagccuggccguggugaucgccugcgccggcgccgugacccuggugagaaagaacagauggcugcugcugaacgugaccagcgaggaccugggcaagaccuucagcgugggcaccggcaacugcaccaccaacauccuggaggccaaguacuggugccccgacagcauggaguacaacugccccaaccugagccccagagaggagcccgacgacaucgacugcuggugcuacggcguggagaacgugagaguggccuacggcaagugcgacagcgccggcagaagcagaagaagcagaagagccaucgaccugcccacccacgagaaccacggccugaagaccagacaggagaaguggaugaccggcagaaugggcgagagacagcugcagaagaucgagagaugguucgugagaaaccccuucuucgccgugaccgcccugaccaucgccuaccuggugggcagcaacaugacccagagaguggugaucgcccugcuggugcuggccgugggccccgccuacagcgcccacugcaucggcaucaccgacagagacuucaucgagggcgugcacggcggcaccugggugagcgccacccuggagcaggacaagugcgugaccgugauggcccccgacaagcccagccuggacaucagccuggagaccguggccaucgacagacccgccgaggugagaaaggugugcuacaacgccgugcugacccacgugaagaucaacgacaagugccccagcaccggcgaggcccaccuggccgaggagaacgagggcgacaacgccugcaagagaaccuacagcgacagaggcuggggcaacggcugcggccuguucggcaagggcagcaucguggccugcgccaaguucaccugcgccaagagcaugagccuguucgagguggaccagaccaagauccaguacgugaucagagcccagcugcacgugggcgccaagcaggagaacuggaacaccgacaucaagacccugaaguucgacgcccugagcggcagccaggagguggaguucaucggcuacggcaaggccacccuggagugccaggugcagaccgccguggacuucggcaacagcuacaucgccgagauggagaccgagagcuggaucguggacagacagugggcccaggaccugacccugcccuggcagagcggcagcggcggcguguggagagagaugcaccaccugguggaguucgagcccccccacgccgccaccaucagagugcuggcccugggcaaccaggagggcagccugaagaccgcccugaccggcgccaugagagugaccaaggacaccaacgacaacaaccuguacaagcugcacggcggccacgugagcugcagagugaagcugagcgcccugacccugaagggcaccagcuacaagaucugcaccgacaagauguucuucgugaagaaccccaccgacaccggccacggcaccguggugaugcaggugaaggugagcaagggcgcccccugcagaauccccgugaucguggccgacgaccugaccgccgccaucaacaagggcauccuggugaccgugaaccccaucgccagcaccaacgacgacgaggugcugaucgaggugaacccccccuucggcgacagcuacaucaucgugggcagaggcgacagcagacugaccuaccaguggcacaaggagggcagcagcaucggcaagcuguucacccagaccaugaagggcguggagagacuggccgugaugggcgacaccgccugggacuucagcagcgccggcggcuucuucaccagcgugggcaagggcauccacaccguguucggcagcgccuuccagggccuguucggcggccugaacuggaucaccaaggugaucaugggcgccgugcugaucugggugggcaucaacaccagaaacaugaccaugagcaugagcaugauccuggugggcgugaucaugauguuccugagccugggcgugggcgccgaccagggcugcgccaucaacuucggcaagugaggacuagugcaucacauuuaaaagcaucucagccuaccaugagaauaagagaaagaaaaugaagaucaauagcuuauucaucucuuuuucuuuuucguugguguaaagccaacacccugucuaaaaaacauaaauuucuuuaaucauuuugccucuuuucucugugcuucaauuaauaaaaaauggaaagaaccuagaucuaaaaaaaaaaaaaaaaaaaaaaaaaaaaaaaaaaaaaaaaaaaaaaaaaaaaaaaaaaaaaaaaugcaucccccccccccccccccccccccccccccccaaaggcucuuuucagagccaccagaauu

SEQ ID NO: 2037 - RNA, 2462 nt, Artificial Sequence
  mRNA product Design i-2 comprising derived and/or modified sequence from YFV__NC_002031.1__X-SS-prMEdelstem_TM-JEV (polyprotein: aa92-681) (opt5)
gggagaggcgcugccuacggagguggcagccaucuccuucucggcaucaagcuuaccaugagaggccugagcucccggaagcgcagaucucacgacgugcucaccguccaguuccugauccuugggaugcugcucaugacaggaggcguuacgcuggugcggaaaaaccgcuggcuucugcucaaugugaccagcgaggaucuggggaagacauuuuccgucggaaccggcaacugcacaaccaauauucuggaagccaaauacuggugucccgacucuauggaguauaacugcccuaaucucagcccgagagaagaacccgaugacaucgauuguuggugcuacgggguggaaaacguucggguggcuuauggaaagugugacuccgccggccgcucuagacggagccgcagagcgauugaucugccuacacaugagaaucacggccuuaaaacccggcaagagaaguggaugacggggcgcaugggagaaagacagcugcagaagaucgagcggugguucguccgcaaccccuuuuucgcugugaccgcccucacaauugccuaccugguuggcuccaauaugacccagagaguggucaucgcccuucuggugcucgcuguggggccugcuuauagcgcccauugcaucggaauuacagaccgggauuuuaucgaaggcguccacgggggaaccuggguuucugcgacgcuggagcaagacaaaugugugacagugauggcccccgauaagccuucccuggacauuagccucgagaccgucgcuaucgauagaccggccgaagugcgcaaaguuugcuacaacgcugugcugacacaugucaagauuaaugacaaaugucccucuaccggcgaggcccaccuugcggaagagaacgaaggcgacaaugccugcaagcggaccuauuccgauagaggguggggaaacggcugugggcuguucggaaagggcagcaucguggcuugcgccaaauuuacaugcgcuaagucuaugucccucuucgagguugaccagacgaaaauucaguacgugauccgcgcccagcugcacgucggggccaagcaagagaauuggaacaccgauaucaaaacacuuaaguuugacgcucugagcggaucccaggaaguggaguucauuggcuacggcaaagcgacccucgaaugucagguccagacagccguggauuuugggaacucuuauaucgcugagauggaaaccgagagcuggauuguugaccggcaaugggcccaggaucugacgcugccuuggcaguccggaagcggcgggguguggagagagaugcaucaccucgucgaguucgagcccccucaugccgcuacaauccgcgugcuggcccuuggaaaucaagaaggcucucugaagaccgcgcucaccggggcuaugcggguuacaaaggacaccaacgauaauaaccuguacaaacuucacggcggacacguguccugcagagucaagcugagcgcccucacacugaaaggcacgucuuauaagauuuguaccgacaaaauguuuuucgugaagaaucccacagauaccgggcauggaacagugguuaugcaggucaaggugagcaaaggcgccccgugccgcaucccugugaucgucgcugacgaccugaccgccgcuauuaacaaggggauccucgugacgguuaaucccauugccuccaccaacgaugacgaggugcugaucgaagucaauccucccuucggagauucuuacauuaucgugggccggggagacagcagacuuacauaucaguggcacaaagagggcuccagcaucggcagcacccuggggaaggccuucuccacaacgcucaaaggagcucagagacuggccgcgcuuggcgacaccgcuugggauuuugggucuaucggaggcguguucaacagcauugggcgggccguccaccaaguuuuuggaggcgccuuccgcacacuguuuggcgggauguccuggaucacccagggacucaugggcgcucugcuucuguggaugggggugaaugccagagaccggucuauugcucucgccuuccuggcgacaggaggcgugcuggucuuucucgccaccaacgugcaugcuugaggacuagugcaucacauuuaaaagcaucucagccuaccaugagaauaagagaaagaaaaugaagaucaauagcuuauucaucucuuuuucuuuuucguugguguaaagccaacacccugucuaaaaaacauaaauuucuuuaaucauuuugccucuuuucucugugcuucaauuaauaaaaaauggaaagaaccuagaucuaaaaaaaaaaaaaaaaaaaaaaaaaaaaaaaaaaaaaaaaaaaaaaaaaaaaaaaaaaaaaaaaugcaucccccccccccccccccccccccccccccccaaaggcucuuuucagagccaccagaauu

SEQ ID NO: 2038 - RNA, 2435 nt, Artificial Sequence
  mRNA product Design i-2 comprising derived and/or modified sequence from YFV__NC_002031.1__SSjev(V3)-prMEdelstem_TM-JEV (polyprotein: aa122-681) (opt5)
gggagaggcgcugccuacggagguggcagccaucuccuucucggcaucaagcuuaccaugaacgagggcagcaucauguggcuggccucccucgcuguggucauugccugcgcgggggcuguuacgcuggugcggaaaaaccgcuggcuucugcucaaugugaccagcgaggaucuggggaagacauuuuccgucggaaccggcaacugcacaaccaauauucuggaagccaaauacuggugucccgacucuauggaguauaacugcccuaaucucagcccgagagaagaacccgaugacaucgauuguuggugcuacgggguggaaaacguucggguggcuuauggaaagugugacuccgccggccgcucuagacggagccgcagagcgauugaucugccuacacaugagaaucacggccuuaaaacccggcaagagaaguggaugacggggcgcaugggagaaagacagcugcagaagaucgagcggugguucguccgcaaccccuuuuucgcugugaccgcccucacaauugccuaccugguuggcuccaauaugacccagagaguggucaucgcccuucuggugcucgcuguggggccugcuuauagcgcccauugcaucggaauuacagaccgggauuuuaucgaaggcguccacgggggaaccuggguuucugcgacgcuggagcaagacaaaugugugacagugauggcccccgauaagccuucccuggacauuagccucgagaccgucgcuaucgauagaccggccgaagugcgcaaaguuugcuacaacgcugugcugacacaugucaagauuaaugacaaaugucccucuaccggcgaggcccaccuugcggaagagaacgaaggcgacaaugccugcaagcggaccuauuccgauagaggguggggaaacggcugugggcuguucggaaagggcagcaucguggcuugcgccaaauuuacaugcgcuaagucuaugucccucuucgagguugaccagacgaaaauucaguacgugauccgcgcccagcugcacgucggggccaagcaagagaauuggaacaccgauaucaaaacacuuaaguuugacgcucugagcggaucccaggaaguggaguucauuggcuacggcaaagcgacccucgaaugucagguccagacagccguggauuuugggaacucuuauaucgcugagauggaaaccgagagcuggauuguugaccggcaaugggcccaggaucugacgcugccuuggcaguccggaagcggcgggguguggagagagaugcaucaccucgucgaguucgagcccccucaugccgcuacaauccgcgugcuggcccuuggaaaucaagaaggcucucugaagaccgcgcucaccggggcuaugcggguuacaaaggacaccaacgauaauaaccuguacaaacuucacggcggacacguguccugcagagucaagcugagcgcccucacacugaaaggcacgucuuauaagauuuguaccgacaaaauguuuuucgugaagaaucccacagauaccgggcauggaacagugguuaugcaggucaaggugagcaaaggcgccccgugccgcaucccugugaucgucgcugacgaccugaccgccgcuauuaacaaggggauccucgugacgguuaaucccauugccuccaccaacgaugacgaggugcugaucgaagucaauccucccuucggagauucuuacauuaucgugggccggggagacagcagacuuacauaucaguggcacaaagagggcuccagcaucggcagcacccuggggaaggccuucuccacaacgcucaaaggagcucagagacuggccgcgcuuggcgacaccgcuugggauuuugggucuaucggaggcguguucaacagcauugggcgggccguccaccaaguuuuuggaggcgccuuccgcacacuguuuggcgggauguccuggaucacccagggacucaugggcgcucugcuucuguggaugggggugaaugccagagaccggucuauugcucucgccuuccuggcgacaggaggcgugcuggucuuucucgccaccaacgugcaugcuugaggacuagugcaucacauuuaaaagcaucucagccuaccaugagaauaagagaaagaaaaugaagaucaauagcuuauucaucucuuuuucuuuuucguugguguaaagccaacacccugucuaaaaaacauaaauuucuuuaaucauuuugccucuuuucucugugcuucaauuaauaaaaaauggaaagaaccuagaucuaaaaaaaaaaaaaaaaaaaaaaaaaaaaaaaaaaaaaaaaaaaaaaaaaaaaaaaaaaaaaaaaugcaucccccccccccccccccccccccccccccccaaaggcucuuuucagagccaccagaauu

SEQ ID NO: 2039 - RNA, 2450 nt, Artificial Sequence
  mRNA product Design i-2 comprising derived and/or modified sequence from YFV__NC_002031.1__X-SS-prME (polyprotein: aa92-778) (opt5)
gggagaggcgcugccuacggagguggcagccaucuccuucucggcaucaagcuuaccaugagaggccugagcucccggaagcgcagaucucacgacgugcucaccguccaguuccugauccuugggaugcugcucaugacaggaggcguuacgcuggugcggaaaaaccgcuggcuucugcucaaugugaccagcgaggaucuggggaagacauuuuccgucggaaccggcaacugcacaaccaauauucuggaagccaaauacuggugucccgacucuauggaguauaacugcccuaaucucagcccgagagaagaacccgaugacaucgauuguuggugcuacgggguggaaaacguucggguggcuuauggaaagugugacuccgccggccgcucuagacggagccgcagagcgauugaucugccuacacaugagaaucacggccuuaaaacccggcaagagaaguggaugacggggcgcaugggagaaagacagcugcagaagaucgagcggugguucguccgcaaccccuuuuucgcugugaccgcccucacaauugccuaccugguuggcuccaauaugacccagagaguggucaucgcccuucuggugcucgcuguggggccugcuuauagcgcccauugcaucggaauuacagaccgggauuuuaucgaaggcguccacgggggaaccuggguuucugcgacgcuggagcaagacaaaugugugacagugauggcccccgauaagccuucccuggacauuagccucgagaccgucgcuaucgauagaccggccgaagugcgcaaaguuugcuacaacgcugugcugacacaugucaagauuaaugacaaaugucccucuaccggcgaggcccaccuugcggaagagaacgaaggcgacaaugccugcaagcggaccuauuccgauagaggguggggaaacggcugugggcuguucggaaagggcagcaucguggcuugcgccaaauuuacaugcgcuaagucuaugucccucuucgagguugaccagacgaaaauucaguacgugauccgcgcccagcugcacgucggggccaagcaagagaauuggaacaccgauaucaaaacacuuaaguuugacgcucugagcggaucccaggaaguggaguucauuggcuacggcaaagcgacccucgaaugucagguccagacagccguggauuuugggaacucuuauaucgcugagauggaaaccgagagcuggauuguugaccggcaaugggcccaggaucugacgcugccuuggcaguccggaagcggcgggguguggagagagaugcaucaccucgucgaguucgagcccccucaugccgcuacaauccgcgugcuggcccuuggaaaucaagaaggcucucugaagaccgcgcucaccggggcuaugcggguuacaaaggacaccaacgauaauaaccuguacaaacuucacggcggacacguguccugcagagucaagcugagcgcccucacacugaaaggcacgucuuauaagauuuguaccgacaaaauguuuuucgugaagaaucccacagauaccgggcauggaacagugguuaugcaggucaaggugagcaaaggcgccccgugccgcaucccugugaucgucgcugacgaccugaccgccgcuauuaacaaggggauccucgugacgguuaaucccauugccuccaccaacgaugacgaggugcugaucgaagucaauccucccuucggagauucuuacauuaucgugggccggggagacagcagacuuacauaucaguggcacaaagagggcuccagcaucggaaagcuguuuacccagacaaugaaaggcguugagcgccucgcggugaugggggauaccgccugggacuucucuuccgcuggaggcuuuuucacgagcgucgggaaggggauucauacaguguuuggcucugccuuccaagggcuguuuggcggacugaacuggaucaccaagguuauuaugggcgcugugcuuaucugggucgggauuaauacacggaacaugaccauguccaugagcaugauccucgugggagugauuaugauguuccugucccugggcgucggggccugaggacuagugcaucacauuuaaaagcaucucagccuaccaugagaauaagagaaagaaaaugaagaucaauagcuuauucaucucuuuuucuuuuucguugguguaaagccaacacccugucuaaaaaacauaaauuucuuuaaucauuuugccucuuuucucugugcuucaauuaauaaaaaauggaaagaaccuagaucuaaaaaaaaaaaaaaaaaaaaaaaaaaaaaaaaaaaaaaaaaaaaaaaaaaaaaaaaaaaaaaaaugcaucccccccccccccccccccccccccccccccaaaggcucuuuucagagccaccagaauu

SEQ ID NO: 2040 - RNA, 2453 nt, Artificial Sequence
  mRNA product Design i-2 comprising derived and/or modified sequence from YFV__NC_002031.1__SSjev(V3)-prME-XX (polyprotein: aa122-788) (opt5)
gggagaggcgcugccuacggagguggcagccaucuccuucucggcaucaagcuuaccaugaacgagggcagcaucauguggcuggccucccucgcuguggucauugccugcgcgggggcuguuacgcuggugcggaaaaaccgcuggcuucugcucaaugugaccagcgaggaucuggggaagacauuuuccgucggaaccggcaacugcacaaccaauauucuggaagccaaauacuggugucccgacucuauggaguauaacugcccuaaucucagcccgagagaagaacccgaugacaucgauuguuggugcuacgggguggaaaacguucggguggcuuauggaaagugugacuccgccggccgcucuagacggagccgcagagcgauugaucugccuacacaugagaaucacggccuuaaaacccggcaagagaaguggaugacggggcgcaugggagaaagacagcugcagaagaucgagcggugguucguccgcaaccccuuuuucgcugugaccgcccucacaauugccuaccugguuggcuccaauaugacccagagaguggucaucgcccuucuggugcucgcuguggggccugcuuauagcgcccauugcaucggaauuacagaccgggauuuuaucgaaggcguccacgggggaaccuggguuucugcgacgcuggagcaagacaaaugugugacagugauggcccccgauaagccuucccuggacauuagccucgagaccgucgcuaucgauagaccggccgaagugcgcaaaguuugcuacaacgcugugcugacacaugucaagauuaaugacaaaugucccucuaccggcgaggcccaccuugcggaagagaacgaaggcgacaaugccugcaagcggaccuauuccgauagaggguggggaaacggcugugggcuguucggaaagggcagcaucguggcuugcgccaaauuuacaugcgcuaagucuaugucccucuucgagguugaccagacgaaaauucaguacgugauccgcgcccagcugcacgucggggccaagcaagagaauuggaacaccgauaucaaaacacuuaaguuugacgcucugagcggaucccaggaaguggaguucauuggcuacggcaaagcgacccucgaaugucagguccagacagccguggauuuugggaacucuuauaucgcugagauggaaaccgagagcuggauuguugaccggcaaugggcccaggaucugacgcugccuuggcaguccggaagcggcgggguguggagagagaugcaucaccucgucgaguucgagcccccucaugccgcuacaauccgcgugcuggcccuuggaaaucaagaaggcucucugaagaccgcgcucaccggggcuaugcggguuacaaaggacaccaacgauaauaaccuguacaaacuucacggcggacacguguccugcagagucaagcugagcgcccucacacugaaaggcacgucuuauaagauuuguaccgacaaaauguuuuucgugaagaaucccacagauaccgggcauggaacagugguuaugcaggucaaggugagcaaaggcgccccgugccgcaucccugugaucgucgcugacgaccugaccgccgcuauuaacaaggggauccucgugacgguuaaucccauugccuccaccaacgaugacgaggugcugaucgaagucaauccucccuucggagauucuuacauuaucgugggccggggagacagcagacuuacauaucaguggcacaaagagggcuccagcaucggaaagcuguuuacccagacaaugaaaggcguugagcgccucgcggugaugggggauaccgccugggacuucucuuccgcuggaggcuuuuucacgagcgucgggaaggggauucauacaguguuuggcucugccuuccaagggcuguuuggcggacugaacuggaucaccaagguuauuaugggcgcugugcuuaucugggucgggauuaauacacggaacaugaccauguccaugagcaugauccucgugggagugauuaugauguuccugucccugggcgucggggccgaucagggaugugcgaucaauuuuggcaaaugaggacuagugcaucacauuuaaaagcaucucagccuaccaugagaauaagagaaagaaaaugaagaucaauagcuuauucaucucuuuuucuuuuucguugguguaaagccaacacccugucuaaaaaacauaaauuucuuuaaucauuuugccucuuuucucugugcuucaauuaauaaaaaauggaaagaaccuagaucuaaaaaaaaaaaaaaaaaaaaaaaaaaaaaaaaaaaaaaaaaaaaaaaaaaaaaaaaaaaaaaaaugcaucccccccccccccccccccccccccccccccaaaggcucuuuucagagccaccagaauu

SEQ ID NO: 2041 - RNA, 2462 nt, Artificial Sequence
  mRNA product Design i-2 comprising derived and/or modified sequence from YFV__NC_002031.1__X-SS-prMEdelstem_TM-JEV (polyprotein: aa92-681) (opt6)
gggagaggcgcugccuacggagguggcagccaucuccuucucggcaucaagcuuaccaugagaggauuaucaaguagaaaaagaagaucacaugauguacuaaccgugcaauuuuugaucuuagggaugcucuuaaugacaggagguguuacauuaguaagaaagaaucgauggcugcuuuuaaaugugacaucagaggauuuagggaaaacauuuucgguaggaacaggaaauuguacuacaaauauacuugaagcaaaauauuggugcccagacucuauggaauauaauuguccaaauuuaaguccuagagaagaaccugacgauauagauuguugguguuaugguguagaaaauguaagaguagcauacggcaaaugcgauagugcaggacguucuagacguucaaggagagccauagaucugcccacucacgaaaaucacggauugaaaacacgacaagaaaaauggaugacugggcgaaugggagaaagacaacuacagaaaauugaaagaugguucguuagaaauccauucuuugccguaacagcuuuaacaauagccuauuuaguagguaguaauaugacacaaagaguaguaauagcauugcuaguguuagcaguuggaccagcuuauagugcacauugcauaggaauaacagauagagacuuuauagaaggaguacacgggggaacuuggguaagugccacuuuagaacaagauaaauguguuacagugauggcgccagauaaaccaagucuggacauaaguuuggaaacaguagcgauugauagacccgcagaaguaagaaaaguuuguuauaaugcuguucuaacccauguuaaaauaaaugauaaaugcccuagcaccggagaagcccaucuagcagaagaaaaugaaggagauaacgcauguaaacgaacauacucagauagaggauggggcaacggauguggcuuguuuggaaaagguagcauaguagcaugcgcuaaauuuacaugcgcaaagucaaugucauuauuugaaguagaucaaacaaaaauacaauauguaauaagagcucaauuacacgugggugcaaaacaagaaaauuggaauacagacauaaagacacuaaaguucgacgcauuaaguggaucacaagagguagaauuuauaggguacggaaaagcgacuuuagagugucaaguccaaacagcaguagauuucgguaacucauacauagcagaaauggaaacugaaaguuggauaguagauagacaaugggcacaagacuugacacuaccuuggcaaucaggaagcggaggaguauggagagaaaugcaucauuuaguagaauuugaaccaccucaugcagcaacaauaagaguauuagcccuaggaaaccaagaaggaaguuuaaaaacagcacuaacaggagcuaugagaguaacaaaagauacaaaugacaacaaucuauacaaauuacacggaggacauguaagcugccggguaaaguugagcgcacuaacauuaaaaggaacgaguuauaaaauaugcacagauaaaauguucuuuguuaaaaauccuacagauaccggucauggaacaguaguaaugcaaguaaaaguaaguaaaggcgcucccuguagaauaccuguaauagucgcagacgauuuaaccgcagcaauaaauaaaggaauauuagucacgguaaacccaauagcgucaacaaaugaugaugaaguauuaauagaaguuaacccaccuuuuggagacaguuauauaauagucggaaggggugauaguagacuaacauaccaauggcauaaagaaggaagcucaauaggaaguacacuaggaaaagcauuuaguacaacauuaaaaggagcacaaagauuagcagcauuaggagauacagcaugggauuuuggaagcauaggaggaguauuuaauaguauagguagagcaguacaucaaguauuuggaggagcauuuagaacauuauuuggaggaaugaguuggauaacacaaggauuaaugggagcauuauuauuauggaugggaguaaaugcaagagauagaaguauagcauuagcauuuuuagcaacaggaggaguauuaguauuuuuagcaacaaauguacaugcaugaggacuagugcaucacauuuaaaagcaucucagccuaccaugagaauaagagaaagaaaaugaagaucaauagcuuauucaucucuuuuucuuuuucguugguguaaagccaacacccugucuaaaaaacauaaauuucuuuaaucauuuugccucuuuucucugugcuucaauuaauaaaaaauggaaagaaccuagaucuaaaaaaaaaaaaaaaaaaaaaaaaaaaaaaaaaaaaaaaaaaaaaaaaaaaaaaaaaaaaaaaaugcaucccccccccccccccccccccccccccccccaaaggcucuuuucagagccaccagaauu

SEQ ID NO: 2042 - RNA, 2435 nt, Artificial Sequence
  mRNA product Design i-2 comprising derived and/or modified sequence from YFV__NC_002031.1__SSjev(V3)-prMEdelstem_TM-JEV (polyprotein: aa122-681) (opt6)
gggagaggcgcugccuacggagguggcagccaucuccuucucggcaucaagcuuaccaugaaugaagguucaauuaugugguuggcaucauuagcaguuguaauugcaugugcuggugcaguuacauuaguaagaaagaaucgauggcugcuuuuaaaugugacaucagaggauuuagggaaaacauuuucgguaggaacaggaaauuguacuacaaauauacuugaagcaaaauauuggugcccagacucuauggaauauaauuguccaaauuuaaguccuagagaagaaccugacgauauagauuguugguguuaugguguagaaaauguaagaguagcauacggcaaaugcgauagugcaggacguucuagacguucaaggagagccauagaucugcccacucacgaaaaucacggauugaaaacacgacaagaaaaauggaugacugggcgaaugggagaaagacaacuacagaaaauugaaagaugguucguuagaaauccauucuuugccguaacagcuuuaacaauagccuauuuaguagguaguaauaugacacaaagaguaguaauagcauugcuaguguuagcaguuggaccagcuuauagugcacauugcauaggaauaacagauagagacuuuauagaaggaguacacgggggaacuuggguaagugccacuuuagaacaagauaaauguguuacagugauggcgccagauaaaccaagucuggacauaaguuuggaaacaguagcgauugauagacccgcagaaguaagaaaaguuuguuauaaugcuguucuaacccauguuaaaauaaaugauaaaugcccuagcaccggagaagcccaucuagcagaagaaaaugaaggagauaacgcauguaaacgaacauacucagauagaggauggggcaacggauguggcuuguuuggaaaagguagcauaguagcaugcgcuaaauuuacaugcgcaaagucaaugucauuauuugaaguagaucaaacaaaaauacaauauguaauaagagcucaauuacacgugggugcaaaacaagaaaauuggaauacagacauaaagacacuaaaguucgacgcauuaaguggaucacaagagguagaauuuauaggguacggaaaagcgacuuuagagugucaaguccaaacagcaguagauuucgguaacucauacauagcagaaauggaaacugaaaguuggauaguagauagacaaugggcacaagacuugacacuaccuuggcaaucaggaagcggaggaguauggagagaaaugcaucauuuaguagaauuugaaccaccucaugcagcaacaauaagaguauuagcccuaggaaaccaagaaggaaguuuaaaaacagcacuaacaggagcuaugagaguaacaaaagauacaaaugacaacaaucuauacaaauuacacggaggacauguaagcugccggguaaaguugagcgcacuaacauuaaaaggaacgaguuauaaaauaugcacagauaaaauguucuuuguuaaaaauccuacagauaccggucauggaacaguaguaaugcaaguaaaaguaaguaaaggcgcucccuguagaauaccuguaauagucgcagacgauuuaaccgcagcaauaaauaaaggaauauuagucacgguaaacccaauagcgucaacaaaugaugaugaaguauuaauagaaguuaacccaccuuuuggagacaguuauauaauagucggaaggggugauaguagacuaacauaccaauggcauaaagaaggaagcucaauaggaaguacacuaggaaaagcauuuaguacaacauuaaaaggagcacaaagauuagcagcauuaggagauacagcaugggauuuuggaagcauaggaggaguauuuaauaguauagguagagcaguacaucaaguauuuggaggagcauuuagaacauuauuuggaggaaugaguuggauaacacaaggauuaaugggagcauuauuauuauggaugggaguaaaugcaagagauagaaguauagcauuagcauuuuuagcaacaggaggaguauuaguauuuuuagcaacaaauguacaugcaugaggacuagugcaucacauuuaaaagcaucucagccuaccaugagaauaagagaaagaaaaugaagaucaauagcuuauucaucucuuuuucuuuuucguugguguaaagccaacacccugucuaaaaaacauaaauuucuuuaaucauuuugccucuuuucucugugcuucaauuaauaaaaaauggaaagaaccuagaucuaaaaaaaaaaaaaaaaaaaaaaaaaaaaaaaaaaaaaaaaaaaaaaaaaaaaaaaaaaaaaaaaugcaucccccccccccccccccccccccccccccccaaaggcucuuuucagagccaccagaauu

SEQ ID NO: 2043 - RNA, 2450 nt, Artificial Sequence
  mRNA product Design i-2 comprising derived and/or modified sequence from YFV__NC_002031.1__X-SS-prME (polyprotein: aa92-778) (opt6)
gggagaggcgcugccuacggagguggcagccaucuccuucucggcaucaagcuuaccaugagaggauuaucaaguagaaaaagaagaucacaugauguacuaaccgugcaauuuuugaucuuagggaugcucuuaaugacaggagguguuacauuaguaagaaagaaucgauggcugcuuuuaaaugugacaucagaggauuuagggaaaacauuuucgguaggaacaggaaauuguacuacaaauauacuugaagcaaaauauuggugcccagacucuauggaauauaauuguccaaauuuaaguccuagagaagaaccugacgauauagauuguugguguuaugguguagaaaauguaagaguagcauacggcaaaugcgauagugcaggacguucuagacguucaaggagagccauagaucugcccacucacgaaaaucacggauugaaaacacgacaagaaaaauggaugacugggcgaaugggagaaagacaacuacagaaaauugaaagaugguucguuagaaauccauucuuugccguaacagcuuuaacaauagccuauuuaguagguaguaauaugacacaaagaguaguaauagcauugcuaguguuagcaguuggaccagcuuauagugcacauugcauaggaauaacagauagagacuuuauagaaggaguacacgggggaacuuggguaagugccacuuuagaacaagauaaauguguuacagugauggcgccagauaaaccaagucuggacauaaguuuggaaacaguagcgauugauagacccgcagaaguaagaaaaguuuguuauaaugcuguucuaacccauguuaaaauaaaugauaaaugcccuagcaccggagaagcccaucuagcagaagaaaaugaaggagauaacgcauguaaacgaacauacucagauagaggauggggcaacggauguggcuuguuuggaaaagguagcauaguagcaugcgcuaaauuuacaugcgcaaagucaaugucauuauuugaaguagaucaaacaaaaauacaauauguaauaagagcucaauuacacgugggugcaaaacaagaaaauuggaauacagacauaaagacacuaaaguucgacgcauuaaguggaucacaagagguagaauuuauaggguacggaaaagcgacuuuagagugucaaguccaaacagcaguagauuucgguaacucauacauagcagaaauggaaacugaaaguuggauaguagauagacaaugggcacaagacuugacacuaccuuggcaaucaggaagcggaggaguauggagagaaaugcaucauuuaguagaauuugaaccaccucaugcagcaacaauaagaguauuagcccuaggaaaccaagaaggaaguuuaaaaacagcacuaacaggagcuaugagaguaacaaaagauacaaaugacaacaaucuauacaaauuacacggaggacauguaagcugccggguaaaguugagcgcacuaacauuaaaaggaacgaguuauaaaauaugcacagauaaaauguucuuuguuaaaaauccuacagauaccggucauggaacaguaguaaugcaaguaaaaguaaguaaaggcgcucccuguagaauaccuguaauagucgcagacgauuuaaccgcagcaauaaauaaaggaauauuagucacgguaaacccaauagcgucaacaaaugaugaugaaguauuaauagaaguuaacccaccuuuuggagacaguuauauaauagucggaaggggugauaguagacuaacauaccaauggcauaaagaaggaagcucaauaggaaaauuauuuacucaaaccaugaaagguguagaaaggcuagcuguuaugggugacacagcaugggauuuuucaagcgcaggaggguucuuuacaucaguagguaaaggaauacauacaguauuuggaagugcauuucaaggauuauuuggugguuuaaauuggauaacaaaaguaauaaugggcgcaguuuuaauauggguagguauaaacacaagaaauaugacaaugucuaugaguaugauauuggucggaguaauaaugauguuuuuaucacuaggagugggugcaugaggacuagugcaucacauuuaaaagcaucucagccuaccaugagaauaagagaaagaaaaugaagaucaauagcuuauucaucucuuuuucuuuuucguugguguaaagccaacacccugucuaaaaaacauaaauuucuuuaaucauuuugccucuuuucucugugcuucaauuaauaaaaaauggaaagaaccuagaucuaaaaaaaaaaaaaaaaaaaaaaaaaaaaaaaaaaaaaaaaaaaaaaaaaaaaaaaaaaaaaaaaugcaucccccccccccccccccccccccccccccccaaaggcucuuuucagagccaccagaauu

SEQ ID NO: 2044 - RNA, 2453 nt, Artificial Sequence
  mRNA product Design i-2 comprising derived and/or modified sequence from YFV__NC_002031.1__SSjev(V3)-prME-XX (polyprotein: aa122-788) (opt6)
gggagaggcgcugccuacggagguggcagccaucuccuucucggcaucaagcuuaccaugaaugaagguucaauuaugugguuggcaucauuagcaguuguaauugcaugugcuggugcaguuacauuaguaagaaagaaucgauggcugcuuuuaaaugugacaucagaggauuuagggaaaacauuuucgguaggaacaggaaauuguacuacaaauauacuugaagcaaaauauuggugcccagacucuauggaauauaauuguccaaauuuaaguccuagagaagaaccugacgauauagauuguugguguuaugguguagaaaauguaagaguagcauacggcaaaugcgauagugcaggacguucuagacguucaaggagagccauagaucugcccacucacgaaaaucacggauugaaaacacgacaagaaaaauggaugacugggcgaaugggagaaagacaacuacagaaaauugaaagaugguucguuagaaauccauucuuugccguaacagcuuuaacaauagccuauuuaguagguaguaauaugacacaaagaguaguaauagcauugcuaguguuagcaguuggaccagcuuauagugcacauugcauaggaauaacagauagagacuuuauagaaggaguacacgggggaacuuggguaagugccacuuuagaacaagauaaauguguuacagugauggcgccagauaaaccaagucuggacauaaguuuggaaacaguagcgauugauagacccgcagaaguaagaaaaguuuguuauaaugcuguucuaacccauguuaaaauaaaugauaaaugcccuagcaccggagaagcccaucuagcagaagaaaaugaaggagauaacgcauguaaacgaacauacucagauagaggauggggcaacggauguggcuuguuuggaaaagguagcauaguagcaugcgcuaaauuuacaugcgcaaagucaaugucauuauuugaaguagaucaaacaaaaauacaauauguaauaagagcucaauuacacgugggugcaaaacaagaaaauuggaauacagacauaaagacacuaaaguucgacgcauuaaguggaucacaagagguagaauuuauaggguacggaaaagcgacuuuagagugucaaguccaaacagcaguagauuucgguaacucauacauagcagaaauggaaacugaaaguuggauaguagauagacaaugggcacaagacuugacacuaccuuggcaaucaggaagcggaggaguauggagagaaaugcaucauuuaguagaauuugaaccaccucaugcagcaacaauaagaguauuagcccuaggaaaccaagaaggaaguuuaaaaacagcacuaacaggagcuaugagaguaacaaaagauacaaaugacaacaaucuauacaaauuacacggaggacauguaagcugccggguaaaguugagcgcacuaacauuaaaaggaacgaguuauaaaauaugcacagauaaaauguucuuuguuaaaaauccuacagauaccggucauggaacaguaguaaugcaaguaaaaguaaguaaaggcgcucccuguagaauaccuguaauagucgcagacgauuuaaccgcagcaauaaauaaaggaauauuagucacgguaaacccaauagcgucaacaaaugaugaugaaguauuaauagaaguuaacccaccuuuuggagacaguuauauaauagucggaaggggugauaguagacuaacauaccaauggcauaaagaaggaagcucaauaggaaaauuauuuacucaaaccaugaaagguguagaaaggcuagcuguuaugggugacacagcaugggauuuuucaagcgcaggaggguucuuuacaucaguagguaaaggaauacauacaguauuuggaagugcauuucaaggauuauuuggugguuuaaauuggauaacaaaaguaauaaugggcgcaguuuuaauauggguagguauaaacacaagaaauaugacaaugucuaugaguaugauauuggucggaguaauaaugauguuuuuaucacuaggagugggugcagaucaagguugcgcuauuaauuuuggaaaaugaggacuagugcaucacauuuaaaagcaucucagccuaccaugagaauaagagaaagaaaaugaagaucaauagcuuauucaucucuuuuucuuuuucguugguguaaagccaacacccugucuaaaaaacauaaauuucuuuaaucauuuugccucuuuucucugugcuucaauuaauaaaaaauggaaagaaccuagaucuaaaaaaaaaaaaaaaaaaaaaaaaaaaaaaaaaaaaaaaaaaaaaaaaaaaaaaaaaaaaaaaaugcaucccccccccccccccccccccccccccccccaaaggcucuuuucagagccaccagaauu

SEQ ID NO: 2045 - RNA, 2462 nt, Artificial Sequence
  mRNA product Design i-2 comprising derived and/or modified sequence from YFV__NC_002031.1__X-SS-prMEdelstem_TM-JEV (polyprotein: aa92-681) (opt11)
gggagaggcgcugccuacggagguggcagccaucuccuucucggcaucaagcuuaccaugcggggacuaagcagcagaaaaagacgcagccacgaugugcucaccgugcaauuccucauacuggggaugcuccuaaugaccggaggcgugacccuaguaaggaaaaacagauggcuacuacuaaacguaaccucagaagaucuaggaaagacauuuucagucggcacaggcaacugcacaaccaacauacuagaagcaaaauauuggugcccagacagcauggaauacaacugucccaaccucagcccaagagaggaaccagacgacauagacugcugguguuacggaguagaaaacguaagaguggcauacggcaaaugcgacagcgcaggcaggagccgaagaucccgcagagccaucgacuugcccacgcacgaaaaccacggccucaaaacacgacaagaaaaauggaugacagggcgaaugggagaacgacagcuccagaaaauagaacgaugguucguccggaacccguucuucgcaguaacggcacuaacaaucgcauaccucguaggcagcaacaugacacaaagaguggucaucgcgcuacucguacuagcaguggggcccgcauacagugcacacugcauaggaaucacagaccgugacuucaucgaaggcguacacggaggaacguggguaagcgcgacacuggaacaagacaaaugcgugacaguaauggcaccagacaaaccaagccuagacauaucccuagaaacggucgccaucgaccgucccgcagaaguacgaaagguaugcuauaaugcaguccucacacacgucaaaauaaacgacaaaugccccagcacgggcgaagcacaccucgccgaagaaaacgaaggggauaacgcgugcaaacgcaccuacuccgacaggggauggggcaacggaugcggacuguucggaaaaggauccauagucgcaugcgcaaaauuuaccugcgcaaaaagcaugagcuuguucgagguagaccaaacgaagauccaauacguaauccgagcucaacuacacguuggggccaagcaagagaacuggaauacggacaucaaaacacuaaaauucgacgcacucuccggcucacaagaagucgaguucaucggcuacggcaaagcaacacuagaaugccaaguacaaacagcgguggacuucggcaacagcuacauagcagaaauggaaacagaaagcuggauaguagaccgacaaugggcacaagaccuaacucugccauggcaaagcggcucaggaggaguguggagagagaugcaccaccugguagaguucgaacccccacacgcagcaacaauaaggguacuggcacuaggcaaccaagaaggcagccuaaaaaccgcacucacaggagccaugcgcgugacgaaggacaccaacgacaacaaccucuacaaacuccacggagggcacguauccugccgcguaaaacuaucagcacuaacgcuaaaaggaacaagcuacaaaauaugcacagacaaaauguucuucgucaaaaaccccacagacacaggccacggcacagucguaaugcaagugaaggucagcaagggggcccccugccgaaucccagucauaguggcagacgaccucacggccgccaucaacaaagggauccugguaacagugaacccaauagcaucgaccaacgacgacgaaguccucauagaagugaaucccccguucggcgacagcuacaucaucguaggacgcggcgacucccgacugacguaccaauggcauaaagaaggcagcagcauugggagcacgcucgggaaagcguucucgaccacgcucaagggcgcgcaaaggcucgcggccuugggcgauaccgcgugggauuucgggagcauaggcggggucuuuaacucgaucgggcgcgcgguccaucaaguguucgggggcgcguucaggaccuuguucgggggcaugagcuggaucacgcaagggcucaugggcgcgcucuugcucuggaugggggucaaugccagggacaggagcauagccuuggccuuucucgcgaccgggggcgugcucguguucuuggccacgaacgugcacgcgugaggacuagugcaucacauuuaaaagcaucucagccuaccaugagaauaagagaaagaaaaugaagaucaauagcuuauucaucucuuuuucuuuuucguugguguaaagccaacacccugucuaaaaaacauaaauuucuuuaaucauuuugccucuuuucucugugcuucaauuaauaaaaaauggaaagaaccuagaucuaaaaaaaaaaaaaaaaaaaaaaaaaaaaaaaaaaaaaaaaaaaaaaaaaaaaaaaaaaaaaaaaugcaucccccccccccccccccccccccccccccccaaaggcucuuuucagagccaccagaauu

SEQ ID NO: 2046 - RNA, 2435 nt, Artificial Sequence
  mRNA product Design i-2 comprising derived and/or modified sequence from YFV__NC_002031.1__SSjev(V3)-prMEdelstem_TM-JEV (polyprotein: aa122-681) (opt11)
gggagaggcgcugccuacggagguggcagccaucuccuucucggcaucaagcuuaccaugaacgagggcucgaucaugugguuggccucgcucgcggucgugaucgcgugcgcgggcgcggugacccuaguaaggaaaaacagauggcuacuacuaaacguaaccucagaagaucuaggaaagacauuuucagucggcacaggcaacugcacaaccaacauacuagaagcaaaauauuggugcccagacagcauggaauacaacugucccaaccucagcccaagagaggaaccagacgacauagacugcugguguuacggaguagaaaacguaagaguggcauacggcaaaugcgacagcgcaggcaggagccgaagaucccgcagagccaucgacuugcccacgcacgaaaaccacggccucaaaacacgacaagaaaaauggaugacagggcgaaugggagaacgacagcuccagaaaauagaacgaugguucguccggaacccguucuucgcaguaacggcacuaacaaucgcauaccucguaggcagcaacaugacacaaagaguggucaucgcgcuacucguacuagcaguggggcccgcauacagugcacacugcauaggaaucacagaccgugacuucaucgaaggcguacacggaggaacguggguaagcgcgacacuggaacaagacaaaugcgugacaguaauggcaccagacaaaccaagccuagacauaucccuagaaacggucgccaucgaccgucccgcagaaguacgaaagguaugcuauaaugcaguccucacacacgucaaaauaaacgacaaaugccccagcacgggcgaagcacaccucgccgaagaaaacgaaggggauaacgcgugcaaacgcaccuacuccgacaggggauggggcaacggaugcggacuguucggaaaaggauccauagucgcaugcgcaaaauuuaccugcgcaaaaagcaugagcuuguucgagguagaccaaacgaagauccaauacguaauccgagcucaacuacacguuggggccaagcaagagaacuggaauacggacaucaaaacacuaaaauucgacgcacucuccggcucacaagaagucgaguucaucggcuacggcaaagcaacacuagaaugccaaguacaaacagcgguggacuucggcaacagcuacauagcagaaauggaaacagaaagcuggauaguagaccgacaaugggcacaagaccuaacucugccauggcaaagcggcucaggaggaguguggagagagaugcaccaccugguagaguucgaacccccacacgcagcaacaauaaggguacuggcacuaggcaaccaagaaggcagccuaaaaaccgcacucacaggagccaugcgcgugacgaaggacaccaacgacaacaaccucuacaaacuccacggagggcacguauccugccgcguaaaacuaucagcacuaacgcuaaaaggaacaagcuacaaaauaugcacagacaaaauguucuucgucaaaaaccccacagacacaggccacggcacagucguaaugcaagugaaggucagcaagggggcccccugccgaaucccagucauaguggcagacgaccucacggccgccaucaacaaagggauccugguaacagugaacccaauagcaucgaccaacgacgacgaaguccucauagaagugaaucccccguucggcgacagcuacaucaucguaggacgcggcgacucccgacugacguaccaauggcauaaagaaggcagcagcauugggagcacgcucgggaaagcguucucgaccacgcucaagggcgcgcaaaggcucgcggccuugggcgauaccgcgugggauuucgggagcauaggcggggucuuuaacucgaucgggcgcgcgguccaucaaguguucgggggcgcguucaggaccuuguucgggggcaugagcuggaucacgcaagggcucaugggcgcgcucuugcucuggaugggggucaaugccagggacaggagcauagccuuggccuuucucgcgaccgggggcgugcucguguucuuggccacgaacgugcacgcgugaggacuagugcaucacauuuaaaagcaucucagccuaccaugagaauaagagaaagaaaaugaagaucaauagcuuauucaucucuuuuucuuuuucguugguguaaagccaacacccugucuaaaaaacauaaauuucuuuaaucauuuugccucuuuucucugugcuucaauuaauaaaaaauggaaagaaccuagaucuaaaaaaaaaaaaaaaaaaaaaaaaaaaaaaaaaaaaaaaaaaaaaaaaaaaaaaaaaaaaaaaaugcaucccccccccccccccccccccccccccccccaaaggcucuuuucagagccaccagaauu

SEQ ID NO: 2047 - RNA, 2450 nt, Artificial Sequence
  mRNA product Design i-2 comprising derived and/or modified sequence from YFV__NC_002031.1__X-SS-prME (polyprotein: aa92-778) (opt11)
gggagaggcgcugccuacggagguggcagccaucuccuucucggcaucaagcuuaccaugcggggacuaagcagcagaaaaagacgcagccacgaugugcucaccgugcaauuccucauacuggggaugcuccuaaugaccggaggcgugacccuaguaaggaaaaacagauggcuacuacuaaacguaaccucagaagaucuaggaaagacauuuucagucggcacaggcaacugcacaaccaacauacuagaagcaaaauauuggugcccagacagcauggaauacaacugucccaaccucagcccaagagaggaaccagacgacauagacugcugguguuacggaguagaaaacguaagaguggcauacggcaaaugcgacagcgcaggcaggagccgaagaucccgcagagccaucgacuugcccacgcacgaaaaccacggccucaaaacacgacaagaaaaauggaugacagggcgaaugggagaacgacagcuccagaaaauagaacgaugguucguccggaacccguucuucgcaguaacggcacuaacaaucgcauaccucguaggcagcaacaugacacaaagaguggucaucgcgcuacucguacuagcaguggggcccgcauacagugcacacugcauaggaaucacagaccgugacuucaucgaaggcguacacggaggaacguggguaagcgcgacacuggaacaagacaaaugcgugacaguaauggcaccagacaaaccaagccuagacauaucccuagaaacggucgccaucgaccgucccgcagaaguacgaaagguaugcuauaaugcaguccucacacacgucaaaauaaacgacaaaugccccagcacgggcgaagcacaccucgccgaagaaaacgaaggggauaacgcgugcaaacgcaccuacuccgacaggggauggggcaacggaugcggacuguucggaaaaggauccauagucgcaugcgcaaaauuuaccugcgcaaaaagcaugagcuuguucgagguagaccaaacgaagauccaauacguaauccgagcucaacuacacguuggggccaagcaagagaacuggaauacggacaucaaaacacuaaaauucgacgcacucuccggcucacaagaagucgaguucaucggcuacggcaaagcaacacuagaaugccaaguacaaacagcgguggacuucggcaacagcuacauagcagaaauggaaacagaaagcuggauaguagaccgacaaugggcacaagaccuaacucugccauggcaaagcggcucaggaggaguguggagagagaugcaccaccugguagaguucgaacccccacacgcagcaacaauaaggguacuggcacuaggcaaccaagaaggcagccuaaaaaccgcacucacaggagccaugcgcgugacgaaggacaccaacgacaacaaccucuacaaacuccacggagggcacguauccugccgcguaaaacuaucagcacuaacgcuaaaaggaacaagcuacaaaauaugcacagacaaaauguucuucgucaaaaaccccacagacacaggccacggcacagucguaaugcaagugaaggucagcaagggggcccccugccgaaucccagucauaguggcagacgaccucacggccgccaucaacaaagggauccugguaacagugaacccaauagcaucgaccaacgacgacgaaguccucauagaagugaaucccccguucggcgacagcuacaucaucguaggacgcggcgacucccgacugacguaccaauggcauaaagaaggcagcagcauuggaaaacuauucacccaaaccaugaagggcgucgaaagacucgcggugaugggagacaccgcaugggacuucucgagcgcaggcggcuucuucacaagcguaggaaaagggauucacacaguauucggauccgcauuccaaggccucuucgggggacuaaacuggauaacgaaaguaauaaugggagcaguucucauauggguaggaaucaacacacgaaacaugacaauguccaugucaaugauacucguaggcguaaucaugauguuucugucacucggagugggagcaugaggacuagugcaucacauuuaaaagcaucucagccuaccaugagaauaagagaaagaaaaugaagaucaauagcuuauucaucucuuuuucuuuuucguugguguaaagccaacacccugucuaaaaaacauaaauuucuuuaaucauuuugccucuuuucucugugcuucaauuaauaaaaaauggaaagaaccuagaucuaaaaaaaaaaaaaaaaaaaaaaaaaaaaaaaaaaaaaaaaaaaaaaaaaaaaaaaaaaaaaaaaugcaucccccccccccccccccccccccccccccccaaaggcucuuuucagagccaccagaauu

SEQ ID NO: 2048 - RNA, 2453 nt, Artificial Sequence
  mRNA product Design i-2 comprising derived and/or modified sequence from YFV__NC_002031.1__SSjev(V3)-prME-XX (polyprotein: aa122-788) (opt11)
gggagaggcgcugccuacggagguggcagccaucuccuucucggcaucaagcuuaccaugaacgagggcucgaucaugugguuggccucgcucgcggucgugaucgcgugcgcgggcgcggugacccuaguaaggaaaaacagauggcuacuacuaaacguaaccucagaagaucuaggaaagacauuuucagucggcacaggcaacugcacaaccaacauacuagaagcaaaauauuggugcccagacagcauggaauacaacugucccaaccucagcccaagagaggaaccagacgacauagacugcugguguuacggaguagaaaacguaagaguggcauacggcaaaugcgacagcgcaggcaggagccgaagaucccgcagagccaucgacuugcccacgcacgaaaaccacggccucaaaacacgacaagaaaaauggaugacagggcgaaugggagaacgacagcuccagaaaauagaacgaugguucguccggaacccguucuucgcaguaacggcacuaacaaucgcauaccucguaggcagcaacaugacacaaagaguggucaucgcgcuacucguacuagcaguggggcccgcauacagugcacacugcauaggaaucacagaccgugacuucaucgaaggcguacacggaggaacguggguaagcgcgacacuggaacaagacaaaugcgugacaguaauggcaccagacaaaccaagccuagacauaucccuagaaacggucgccaucgaccgucccgcagaaguacgaaagguaugcuauaaugcaguccucacacacgucaaaauaaacgacaaaugccccagcacgggcgaagcacaccucgccgaagaaaacgaaggggauaacgcgugcaaacgcaccuacuccgacaggggauggggcaacggaugcggacuguucggaaaaggauccauagucgcaugcgcaaaauuuaccugcgcaaaaagcaugagcuuguucgagguagaccaaacgaagauccaauacguaauccgagcucaacuacacguuggggccaagcaagagaacuggaauacggacaucaaaacacuaaaauucgacgcacucuccggcucacaagaagucgaguucaucggcuacggcaaagcaacacuagaaugccaaguacaaacagcgguggacuucggcaacagcuacauagcagaaauggaaacagaaagcuggauaguagaccgacaaugggcacaagaccuaacucugccauggcaaagcggcucaggaggaguguggagagagaugcaccaccugguagaguucgaacccccacacgcagcaacaauaaggguacuggcacuaggcaaccaagaaggcagccuaaaaaccgcacucacaggagccaugcgcgugacgaaggacaccaacgacaacaaccucuacaaacuccacggagggcacguauccugccgcguaaaacuaucagcacuaacgcuaaaaggaacaagcuacaaaauaugcacagacaaaauguucuucgucaaaaaccccacagacacaggccacggcacagucguaaugcaagugaaggucagcaagggggcccccugccgaaucccagucauaguggcagacgaccucacggccgccaucaacaaagggauccugguaacagugaacccaauagcaucgaccaacgacgacgaaguccucauagaagugaaucccccguucggcgacagcuacaucaucguaggacgcggcgacucccgacugacguaccaauggcauaaagaaggcagcagcauuggaaaacuauucacccaaaccaugaagggcgucgaaagacucgcggugaugggagacaccgcaugggacuucucgagcgcaggcggcuucuucacaagcguaggaaaagggauucacacaguauucggauccgcauuccaaggccucuucgggggacuaaacuggauaacgaaaguaauaaugggagcaguucucauauggguaggaaucaacacacgaaacaugacaauguccaugucaaugauacucguaggcguaaucaugauguuucugucacucggagugggagcagaccaagguugcgccauaaacuucggcaagugaggacuagugcaucacauuuaaaagcaucucagccuaccaugagaauaagagaaagaaaaugaagaucaauagcuuauucaucucuuuuucuuuuucguugguguaaagccaacacccugucuaaaaaacauaaauuucuuuaaucauuuugccucuuuucucugugcuucaauuaauaaaaaauggaaagaaccuagaucuaaaaaaaaaaaaaaaaaaaaaaaaaaaaaaaaaaaaaaaaaaaaaaaaaaaaaaaaaaaaaaaaugcaucccccccccccccccccccccccccccccccaaaggcucuuuucagagccaccagaauu

SEQ ID NO: 2049 - RNA, 2293 nt, Artificial Sequence
  mRNA product Design i-3 comprising derived and/or modified sequence from YFV__NC_002031.1__X-SS-prMEdelstem_TM-JEV (polyprotein: aa92-681) (wt)
gggagaaagcuuaccaugagaggauuguccucaaggaaacgccguucccaugauguucugacugugcaauuccuaauuuugggaaugcuguugaugacggguggagugaccuuggugcggaaaaacagaugguugcuccuaaaugugacaucugaggaccucgggaaaacauucucugugggcacaggcaacugcacaacaaacauuuuggaagccaaguacuggugcccagacucaauggaauacaacugucccaaucucaguccaagagaggagccagaugacauugauugcuggugcuaugggguggaaaacguuagagucgcauaugguaagugugacucagcaggcaggucuaggaggucaagaagggccauugacuugccuacgcaugaaaaccaugguuugaagacccggcaagaaaaauggaugacuggaagaaugggugaaaggcaacuccaaaagauugagagaugguucgugaggaaccccuuuuuugcagugacggcucugaccauugccuaccuugugggaagcaacaugacgcaacgagucgugauugcccuacuggucuuggcuguugguccggccuacucagcucacugcauuggaauuacugacagggauuucauugagggggugcauggaggaacuuggguuucagcuacccuggagcaagacaagugugucacuguuauggccccugacaagccuucauuggacaucucacuagagacaguagccauugauagaccugcugaggugaggaaaguguguuacaaugcaguucucacucaugugaagauuaaugacaagugccccagcacuggagaggcccaccuagcugaagagaacgaaggggacaaugcgugcaagcgcacuuauucugauagaggcuggggcaauggcuguggccuauuugggaaagggagcauuguggcaugcgccaaauucacuugugccaaauccaugaguuuguuugagguugaucagaccaaaauucaguaugucaucagagcacaauugcauguaggggccaagcaggaaaauuggaauaccgacauuaagacucucaaguuugaugcccugucaggcucccaggaagucgaguucauuggguauggaaaagcuacacuggaaugccaggugcaaacugcgguggacuuugguaacaguuacaucgcugagauggaaacagagagcuggauaguggacagacagugggcccaggacuugacccugccauggcagaguggaaguggcgggguguggagagagaugcaucaucuugucgaauuugaaccuccgcaugccgccacuaucagaguacuggcccugggaaaccaggaaggcuccuugaaaacagcucuuacuggcgcaaugaggguuacaaaggacacaaaugacaacaaccuuuacaaacuacaugguggacauguuucuugcagagugaaauugucagcuuugacacucaaggggacauccuacaaaauaugcacugacaaaauguuuuuugucaagaacccaacugacacuggccauggcacuguugugaugcaggugaaagugucaaaaggagcccccugcaggauuccagugauaguagcugaugaucuuacagcggcaaucaauaaaggcauuuugguuacaguuaaccccaucgccucaaccaaugaugaugaagugcugauugaggugaacccaccuuuuggagacagcuacauuaucguugggagaggagauucacgucucacuuaccaguggcacaaagagggaagcucaauaggcagcacgcugggcaaggccuuuucaacaacuuugaagggagcucaaagacuggcagcguugggcgacacagccugggacuuuggcucuauuggaggggucuucaacuccauaggaagagccguucaccaaguguuugguggugccuucagaacacucuuugggggaaugucuuggaucacacaagggcuaaugggugcccuacugcucuggaugggcgucaacgcacgagaccgaucaauugcuuuggccuucuuagccacaggaggugugcucguguucuuagcgaccaaugugcacgccuaaggacuaguuauaagacugacuagcccgaugggccucccaacgggcccuccuccccuccuugcaccgagauuaauaaaaaaaaaaaaaaaaaaaaaaaaaaaaaaaaaaaaaaaaaaaaaaaaaaaaaaaaaaaaaaaaugcaucccccccccccccccccccccccccccccccaaaggcucuuuucagagccaccagaauu

SEQ ID NO: 2050 - RNA, 2266 nt, Artificial Sequence
  mRNA product Design i-3 comprising derived and/or modified sequence from YFV__NC_002031.1__SSjev(V3)-prMEdelstem_TM-JEV (polyprotein: aa122-681) (wt)
gggagaaagcuuaccaugaaugaaggcucaaucauguggcucgcgagcuuggcaguugucauagcuugugcaggagccgugaccuuggugcggaaaaacagaugguugcuccuaaaugugacaucugaggaccucgggaaaacauucucugugggcacaggcaacugcacaacaaacauuuuggaagccaaguacuggugcccagacucaauggaauacaacugucccaaucucaguccaagagaggagccagaugacauugauugcuggugcuaugggguggaaaacguuagagucgcauaugguaagugugacucagcaggcaggucuaggaggucaagaagggccauugacuugccuacgcaugaaaaccaugguuugaagacccggcaagaaaaauggaugacuggaagaaugggugaaaggcaacuccaaaagauugagagaugguucgugaggaaccccuuuuuugcagugacggcucugaccauugccuaccuugugggaagcaacaugacgcaacgagucgugauugcccuacuggucuuggcuguugguccggccuacucagcucacugcauuggaauuacugacagggauuucauugagggggugcauggaggaacuuggguuucagcuacccuggagcaagacaagugugucacuguuauggccccugacaagccuucauuggacaucucacuagagacaguagccauugauagaccugcugaggugaggaaaguguguuacaaugcaguucucacucaugugaagauuaaugacaagugccccagcacuggagaggcccaccuagcugaagagaacgaaggggacaaugcgugcaagcgcacuuauucugauagaggcuggggcaauggcuguggccuauuugggaaagggagcauuguggcaugcgccaaauucacuugugccaaauccaugaguuuguuugagguugaucagaccaaaauucaguaugucaucagagcacaauugcauguaggggccaagcaggaaaauuggaauaccgacauuaagacucucaaguuugaugcccugucaggcucccaggaagucgaguucauuggguauggaaaagcuacacuggaaugccaggugcaaacugcgguggacuuugguaacaguuacaucgcugagauggaaacagagagcuggauaguggacagacagugggcccaggacuugacccugccauggcagaguggaaguggcgggguguggagagagaugcaucaucuugucgaauuugaaccuccgcaugccgccacuaucagaguacuggcccugggaaaccaggaaggcuccuugaaaacagcucuuacuggcgcaaugaggguuacaaaggacacaaaugacaacaaccuuuacaaacuacaugguggacauguuucuugcagagugaaauugucagcuuugacacucaaggggacauccuacaaaauaugcacugacaaaauguuuuuugucaagaacccaacugacacuggccauggcacuguugugaugcaggugaaagugucaaaaggagcccccugcaggauuccagugauaguagcugaugaucuuacagcggcaaucaauaaaggcauuuugguuacaguuaaccccaucgccucaaccaaugaugaugaagugcugauugaggugaacccaccuuuuggagacagcuacauuaucguugggagaggagauucacgucucacuuaccaguggcacaaagagggaagcucaauaggcagcacgcugggcaaggccuuuucaacaacuuugaagggagcucaaagacuggcagcguugggcgacacagccugggacuuuggcucuauuggaggggucuucaacuccauaggaagagccguucaccaaguguuugguggugccuucagaacacucuuugggggaaugucuuggaucacacaagggcuaaugggugcccuacugcucuggaugggcgucaacgcacgagaccgaucaauugcuuuggccuucuuagccacaggaggugugcucguguucuuagcgaccaaugugcacgccuaaggacuaguuauaagacugacuagcccgaugggccucccaacgggcccuccuccccuccuugcaccgagauuaauaaaaaaaaaaaaaaaaaaaaaaaaaaaaaaaaaaaaaaaaaaaaaaaaaaaaaaaaaaaaaaaaugcaucccccccccccccccccccccccccccccccaaaggcucuuuucagagccaccagaauu

SEQ ID NO: 2051 - RNA, 2281 nt, Artificial Sequence
  mRNA product Design i-3 comprising derived and/or modified sequence from YFV__NC_002031.1__X-SS-prME (polyprotein: aa92-778) (wt)
gggagaaagcuuaccaugagaggauuguccucaaggaaacgccguucccaugauguucugacugugcaauuccuaauuuugggaaugcuguugaugacggguggagugaccuuggugcggaaaaacagaugguugcuccuaaaugugacaucugaggaccucgggaaaacauucucugugggcacaggcaacugcacaacaaacauuuuggaagccaaguacuggugcccagacucaauggaauacaacugucccaaucucaguccaagagaggagccagaugacauugauugcuggugcuaugggguggaaaacguuagagucgcauaugguaagugugacucagcaggcaggucuaggaggucaagaagggccauugacuugccuacgcaugaaaaccaugguuugaagacccggcaagaaaaauggaugacuggaagaaugggugaaaggcaacuccaaaagauugagagaugguucgugaggaaccccuuuuuugcagugacggcucugaccauugccuaccuugugggaagcaacaugacgcaacgagucgugauugcccuacuggucuuggcuguugguccggccuacucagcucacugcauuggaauuacugacagggauuucauugagggggugcauggaggaacuuggguuucagcuacccuggagcaagacaagugugucacuguuauggccccugacaagccuucauuggacaucucacuagagacaguagccauugauagaccugcugaggugaggaaaguguguuacaaugcaguucucacucaugugaagauuaaugacaagugccccagcacuggagaggcccaccuagcugaagagaacgaaggggacaaugcgugcaagcgcacuuauucugauagaggcuggggcaauggcuguggccuauuugggaaagggagcauuguggcaugcgccaaauucacuugugccaaauccaugaguuuguuugagguugaucagaccaaaauucaguaugucaucagagcacaauugcauguaggggccaagcaggaaaauuggaauaccgacauuaagacucucaaguuugaugcccugucaggcucccaggaagucgaguucauuggguauggaaaagcuacacuggaaugccaggugcaaacugcgguggacuuugguaacaguuacaucgcugagauggaaacagagagcuggauaguggacagacagugggcccaggacuugacccugccauggcagaguggaaguggcgggguguggagagagaugcaucaucuugucgaauuugaaccuccgcaugccgccacuaucagaguacuggcccugggaaaccaggaaggcuccuugaaaacagcucuuacuggcgcaaugaggguuacaaaggacacaaaugacaacaaccuuuacaaacuacaugguggacauguuucuugcagagugaaauugucagcuuugacacucaaggggacauccuacaaaauaugcacugacaaaauguuuuuugucaagaacccaacugacacuggccauggcacuguugugaugcaggugaaagugucaaaaggagcccccugcaggauuccagugauaguagcugaugaucuuacagcggcaaucaauaaaggcauuuugguuacaguuaaccccaucgccucaaccaaugaugaugaagugcugauugaggugaacccaccuuuuggagacagcuacauuaucguugggagaggagauucacgucucacuuaccaguggcacaaagagggaagcucaauaggaaaguuguucacucagaccaugaaaggcguggaacgccuggccgucaugggagacaccgccugggauuucagcuccgcuggaggguucuucacuucgguugggaaaggaauccauacgguguuuggcucugccuuucaggggcuauuuggcggcuugaacuggauaacaaaggucaucaugggggcgguacuuauauggguuggcaucaacacaagaaacaugacaauguccaugagcaugaucuugguaggagugaucaugauguuuuugucucuaggaguuggggcguaaggacuaguuauaagacugacuagcccgaugggccucccaacgggcccuccuccccuccuugcaccgagauuaauaaaaaaaaaaaaaaaaaaaaaaaaaaaaaaaaaaaaaaaaaaaaaaaaaaaaaaaaaaaaaaaaugcaucccccccccccccccccccccccccccccccaaaggcucuuuucagagccaccagaauu

SEQ ID NO: 2052 - RNA, 2284 nt, Artificial Sequence
  mRNA product Design i-3 comprising derived and/or modified sequence from YFV__NC_002031.1__SSjev(V3)-prME-XX (polyprotein: aa122-788) (wt)
gggagaaagcuuaccaugaaugaaggcucaaucauguggcucgcgagcuuggcaguugucauagcuugugcaggagccgugaccuuggugcggaaaaacagaugguugcuccuaaaugugacaucugaggaccucgggaaaacauucucugugggcacaggcaacugcacaacaaacauuuuggaagccaaguacuggugcccagacucaauggaauacaacugucccaaucucaguccaagagaggagccagaugacauugauugcuggugcuaugggguggaaaacguuagagucgcauaugguaagugugacucagcaggcaggucuaggaggucaagaagggccauugacuugccuacgcaugaaaaccaugguuugaagacccggcaagaaaaauggaugacuggaagaaugggugaaaggcaacuccaaaagauugagagaugguucgugaggaaccccuuuuuugcagugacggcucugaccauugccuaccuugugggaagcaacaugacgcaacgagucgugauugcccuacuggucuuggcuguugguccggccuacucagcucacugcauuggaauuacugacagggauuucauugagggggugcauggaggaacuuggguuucagcuacccuggagcaagacaagugugucacuguuauggccccugacaagccuucauuggacaucucacuagagacaguagccauugauagaccugcugaggugaggaaaguguguuacaaugcaguucucacucaugugaagauuaaugacaagugccccagcacuggagaggcccaccuagcugaagagaacgaaggggacaaugcgugcaagcgcacuuauucugauagaggcuggggcaauggcuguggccuauuugggaaagggagcauuguggcaugcgccaaauucacuugugccaaauccaugaguuuguuugagguugaucagaccaaaauucaguaugucaucagagcacaauugcauguaggggccaagcaggaaaauuggaauaccgacauuaagacucucaaguuugaugcccugucaggcucccaggaagucgaguucauuggguauggaaaagcuacacuggaaugccaggugcaaacugcgguggacuuugguaacaguuacaucgcugagauggaaacagagagcuggauaguggacagacagugggcccaggacuugacccugccauggcagaguggaaguggcgggguguggagagagaugcaucaucuugucgaauuugaaccuccgcaugccgccacuaucagaguacuggcccugggaaaccaggaaggcuccuugaaaacagcucuuacuggcgcaaugaggguuacaaaggacacaaaugacaacaaccuuuacaaacuacaugguggacauguuucuugcagagugaaauugucagcuuugacacucaaggggacauccuacaaaauaugcacugacaaaauguuuuuugucaagaacccaacugacacuggccauggcacuguugugaugcaggugaaagugucaaaaggagcccccugcaggauuccagugauaguagcugaugaucuuacagcggcaaucaauaaaggcauuuugguuacaguuaaccccaucgccucaaccaaugaugaugaagugcugauugaggugaacccaccuuuuggagacagcuacauuaucguugggagaggagauucacgucucacuuaccaguggcacaaagagggaagcucaauaggaaaguuguucacucagaccaugaaaggcguggaacgccuggccgucaugggagacaccgccugggauuucagcuccgcuggaggguucuucacuucgguugggaaaggaauccauacgguguuuggcucugccuuucaggggcuauuuggcggcuugaacuggauaacaaaggucaucaugggggcgguacuuauauggguuggcaucaacacaagaaacaugacaauguccaugagcaugaucuugguaggagugaucaugauguuuuugucucuaggaguuggggcggaucaaggaugcgccaucaacuuuggcaaguaaggacuaguuauaagacugacuagcccgaugggccucccaacgggcccuccuccccuccuugcaccgagauuaauaaaaaaaaaaaaaaaaaaaaaaaaaaaaaaaaaaaaaaaaaaaaaaaaaaaaaaaaaaaaaaaaugcaucccccccccccccccccccccccccccccccaaaggcucuuuucagagccaccagaauu

SEQ ID NO: 2053 - RNA, 2293 nt, Artificial Sequence
  mRNA product Design i-3 comprising derived and/or modified sequence from YFV__NC_002031.1__X-SS-prMEdelstem_TM-JEV (polyprotein: aa92-681) (opt1)
gggagaaagcuuaccaugcggggccugagcucccgcaagcggcgcagccacgacgugcucaccguccaguuccugauccuggggaugcuccugaugaccggcggggugacgcuggugcggaagaaccgcuggcuccugcugaacgucaccuccgaggaccucggcaagaccuucagcguggggaccggcaacugcacgaccaacauccuggaggccaaguacuggugccccgacuccauggaguacaacugcccgaaccugagcccccgggaggagcccgacgacaucgacugcuggugcuacggcguggagaacguccgcguggccuacgggaagugcgacuccgcgggccggagccgccggucccgccgggccaucgaccuccccacccacgagaaccacgggcugaagacccgccaggagaaguggaugacgggccggaugggggagcgccagcugcagaagaucgagcggugguucgugcgcaacccguucuucgccgucaccgcccucaccaucgccuaccuggugggcagcaacaugacccagcggguggucaucgcgcugcucgugcuggccgugggccccgccuacuccgcccacugcaucgggaucacggaccgcgacuucaucgagggcguccacgggggcaccugggugagcgcgacccuggagcaggacaagugcgugaccgucauggcccccgacaagcccucccucgacaucagccuggagacgguggccaucgaccggccggccgaggugcgcaaggucugcuacaacgccgugcugacccacgugaagaucaacgacaagugccccuccaccggcgaggcgcaccucgccgaggagaacgagggggacaacgccugcaagcggaccuacagcgaccggggcugggggaacggcugcgggcuguucggcaagggcuccaucgucgccugcgccaaguucacgugcgcgaagagcaugucccuguucgagguggaccagaccaagauccaguacgucauccgcgcccagcuccacgugggggccaagcaggagaacuggaacaccgacaucaagacccugaaguucgacgcccugagcggcagccaggagguggaguucaucggguacggcaaggccacgcucgagugccagguccagaccgcgguggacuucgggaacuccuacaucgccgagauggagaccgagagcuggaucguggaccggcagugggcccaggaccugacccugcccuggcaguccggcagcggcggggucuggcgcgagaugcaccaccucguggaguucgagcccccgcacgccgccacgauccgggugcuggcgcugggcaaccaggaggggucccucaagaccgcccugaccggcgccaugcgcgucaccaaggacacgaacgacaacaaccuguacaagcuccacgggggccacgugagcugccgggugaagcuguccgcccugacccucaagggcaccagcuacaagaucugcaccgacaagauguucuucgucaagaaccccacggacaccgggcacggcaccguggugaugcaggucaagguguccaagggggcgcccugccgcaucccggugaucgucgccgacgaccugaccgccgccaucaacaagggcauccuggugaccgugaacccgaucgccagcacgaacgacgacgagguccucaucgaggugaacccccccuucggcgacuccuacaucaucguggggcggggcgacagccgccugaccuaccaguggcacaaggagggguccagcaucggcagcacccuggggaaggccuucuccaccacgcucaagggcgcccagcgccuggcggcccugggggacaccgccugggacuucggcagcaucgggggcguguucaacuccaucggccgggccguccaccagguguucgggggcgccuuccgcacccucuucgggggcaugagcuggaucacccaggggcugaugggcgcgcugcuccuguggaugggggugaacgcccgggaccgcuccaucgcccuggccuuccucgcgacgggcggcguccugguguuccuggccaccaacgugcacgccugaggacuaguuauaagacugacuagcccgaugggccucccaacgggcccuccuccccuccuugcaccgagauuaauaaaaaaaaaaaaaaaaaaaaaaaaaaaaaaaaaaaaaaaaaaaaaaaaaaaaaaaaaaaaaaaaugcaucccccccccccccccccccccccccccccccaaaggcucuuuucagagccaccagaauu

SEQ ID NO: 2054 - RNA, 2266 nt, Artificial Sequence
  mRNA product Design i-3 comprising derived and/or modified sequence from YFV__NC_002031.1__SSjev(V3)-prMEdelstem_TM-JEV (polyprotein: aa122-681) (opt1)
gggagaaagcuuaccaugaacgagggcagcaucauguggcuggccucccucgccguggucaucgcgugcgccggggccgugacgcuggugcggaagaaccgcuggcuccugcugaacgucaccuccgaggaccucggcaagaccuucagcguggggaccggcaacugcacgaccaacauccuggaggccaaguacuggugccccgacuccauggaguacaacugcccgaaccugagcccccgggaggagcccgacgacaucgacugcuggugcuacggcguggagaacguccgcguggccuacgggaagugcgacuccgcgggccggagccgccggucccgccgggccaucgaccuccccacccacgagaaccacgggcugaagacccgccaggagaaguggaugacgggccggaugggggagcgccagcugcagaagaucgagcggugguucgugcgcaacccguucuucgccgucaccgcccucaccaucgccuaccuggugggcagcaacaugacccagcggguggucaucgcgcugcucgugcuggccgugggccccgccuacuccgcccacugcaucgggaucacggaccgcgacuucaucgagggcguccacgggggcaccugggugagcgcgacccuggagcaggacaagugcgugaccgucauggcccccgacaagcccucccucgacaucagccuggagacgguggccaucgaccggccggccgaggugcgcaaggucugcuacaacgccgugcugacccacgugaagaucaacgacaagugccccuccaccggcgaggcgcaccucgccgaggagaacgagggggacaacgccugcaagcggaccuacagcgaccggggcugggggaacggcugcgggcuguucggcaagggcuccaucgucgccugcgccaaguucacgugcgcgaagagcaugucccuguucgagguggaccagaccaagauccaguacgucauccgcgcccagcuccacgugggggccaagcaggagaacuggaacaccgacaucaagacccugaaguucgacgcccugagcggcagccaggagguggaguucaucggguacggcaaggccacgcucgagugccagguccagaccgcgguggacuucgggaacuccuacaucgccgagauggagaccgagagcuggaucguggaccggcagugggcccaggaccugacccugcccuggcaguccggcagcggcggggucuggcgcgagaugcaccaccucguggaguucgagcccccgcacgccgccacgauccgggugcuggcgcugggcaaccaggaggggucccucaagaccgcccugaccggcgccaugcgcgucaccaaggacacgaacgacaacaaccuguacaagcuccacgggggccacgugagcugccgggugaagcuguccgcccugacccucaagggcaccagcuacaagaucugcaccgacaagauguucuucgucaagaaccccacggacaccgggcacggcaccguggugaugcaggucaagguguccaagggggcgcccugccgcaucccggugaucgucgccgacgaccugaccgccgccaucaacaagggcauccuggugaccgugaacccgaucgccagcacgaacgacgacgagguccucaucgaggugaacccccccuucggcgacuccuacaucaucguggggcggggcgacagccgccugaccuaccaguggcacaaggagggguccagcaucggcagcacccuggggaaggccuucuccaccacgcucaagggcgcccagcgccuggcggcccugggggacaccgccugggacuucggcagcaucgggggcguguucaacuccaucggccgggccguccaccagguguucgggggcgccuuccgcacccucuucgggggcaugagcuggaucacccaggggcugaugggcgcgcugcuccuguggaugggggugaacgcccgggaccgcuccaucgcccuggccuuccucgcgacgggcggcguccugguguuccuggccaccaacgugcacgccugaggacuaguuauaagacugacuagcccgaugggccucccaacgggcccuccuccccuccuugcaccgagauuaauaaaaaaaaaaaaaaaaaaaaaaaaaaaaaaaaaaaaaaaaaaaaaaaaaaaaaaaaaaaaaaaaugcaucccccccccccccccccccccccccccccccaaaggcucuuuucagagccaccagaauu

SEQ ID NO: 2055 - RNA, 2281 nt, Artificial Sequence
  mRNA product Design i-3 comprising derived and/or modified sequence from YFV__NC_002031.1__X-SS-prME (polyprotein: aa92-778) (opt1)
gggagaaagcuuaccaugcggggccugagcucccgcaagcggcgcagccacgacgugcucaccguccaguuccugauccuggggaugcuccugaugaccggcggggugacgcuggugcggaagaaccgcuggcuccugcugaacgucaccuccgaggaccucggcaagaccuucagcguggggaccggcaacugcacgaccaacauccuggaggccaaguacuggugccccgacuccauggaguacaacugcccgaaccugagcccccgggaggagcccgacgacaucgacugcuggugcuacggcguggagaacguccgcguggccuacgggaagugcgacuccgcgggccggagccgccggucccgccgggccaucgaccuccccacccacgagaaccacgggcugaagacccgccaggagaaguggaugacgggccggaugggggagcgccagcugcagaagaucgagcggugguucgugcgcaacccguucuucgccgucaccgcccucaccaucgccuaccuggugggcagcaacaugacccagcggguggucaucgcgcugcucgugcuggccgugggccccgccuacuccgcccacugcaucgggaucacggaccgcgacuucaucgagggcguccacgggggcaccugggugagcgcgacccuggagcaggacaagugcgugaccgucauggcccccgacaagcccucccucgacaucagccuggagacgguggccaucgaccggccggccgaggugcgcaaggucugcuacaacgccgugcugacccacgugaagaucaacgacaagugccccuccaccggcgaggcgcaccucgccgaggagaacgagggggacaacgccugcaagcggaccuacagcgaccggggcugggggaacggcugcgggcuguucggcaagggcuccaucgucgccugcgccaaguucacgugcgcgaagagcaugucccuguucgagguggaccagaccaagauccaguacgucauccgcgcccagcuccacgugggggccaagcaggagaacuggaacaccgacaucaagacccugaaguucgacgcccugagcggcagccaggagguggaguucaucggguacggcaaggccacgcucgagugccagguccagaccgcgguggacuucgggaacuccuacaucgccgagauggagaccgagagcuggaucguggaccggcagugggcccaggaccugacccugcccuggcaguccggcagcggcggggucuggcgcgagaugcaccaccucguggaguucgagcccccgcacgccgccacgauccgggugcuggcgcugggcaaccaggaggggucccucaagaccgcccugaccggcgccaugcgcgucaccaaggacacgaacgacaacaaccuguacaagcuccacgggggccacgugagcugccgggugaagcuguccgcccugacccucaagggcaccagcuacaagaucugcaccgacaagauguucuucgucaagaaccccacggacaccgggcacggcaccguggugaugcaggucaagguguccaagggggcgcccugccgcaucccggugaucgucgccgacgaccugaccgccgccaucaacaagggcauccuggugaccgugaacccgaucgccagcacgaacgacgacgagguccucaucgaggugaacccccccuucggcgacuccuacaucaucguggggcggggcgacagccgccugaccuaccaguggcacaaggagggguccagcaucggcaagcuguucacccagaccaugaagggggucgagcggcuggcggugaugggcgacacggccugggacuucuccagcgccggcggguucuucaccuccgugggcaaggggauccacaccgucuucggcagcgccuuccaggggcucuucggcggccugaacuggaucaccaaggugaucaugggggccgugcugaucugggucggcaucaacacgcgcaacaugaccauguccaugagcaugauccucgugggggugaucaugauguuccugagccugggcgucggggcgugaggacuaguuauaagacugacuagcccgaugggccucccaacgggcccuccuccccuccuugcaccgagauuaauaaaaaaaaaaaaaaaaaaaaaaaaaaaaaaaaaaaaaaaaaaaaaaaaaaaaaaaaaaaaaaaaugcaucccccccccccccccccccccccccccccccaaaggcucuuuucagagccaccagaauu

SEQ ID NO: 2056 - RNA, 2284 nt, Artificial Sequence
  mRNA product Design i-3 comprising derived and/or modified sequence from YFV__NC_002031.1__SSjev(V3)-prME-XX (polyprotein: aa122-788) (opt1)
gggagaaagcuuaccaugaacgagggcagcaucauguggcuggccucccucgccguggucaucgcgugcgccggggccgugacgcuggugcggaagaaccgcuggcuccugcugaacgucaccuccgaggaccucggcaagaccuucagcguggggaccggcaacugcacgaccaacauccuggaggccaaguacuggugccccgacuccauggaguacaacugcccgaaccugagcccccgggaggagcccgacgacaucgacugcuggugcuacggcguggagaacguccgcguggccuacgggaagugcgacuccgcgggccggagccgccggucccgccgggccaucgaccuccccacccacgagaaccacgggcugaagacccgccaggagaaguggaugacgggccggaugggggagcgccagcugcagaagaucgagcggugguucgugcgcaacccguucuucgccgucaccgcccucaccaucgccuaccuggugggcagcaacaugacccagcggguggucaucgcgcugcucgugcuggccgugggccccgccuacuccgcccacugcaucgggaucacggaccgcgacuucaucgagggcguccacgggggcaccugggugagcgcgacccuggagcaggacaagugcgugaccgucauggcccccgacaagcccucccucgacaucagccuggagacgguggccaucgaccggccggccgaggugcgcaaggucugcuacaacgccgugcugacccacgugaagaucaacgacaagugccccuccaccggcgaggcgcaccucgccgaggagaacgagggggacaacgccugcaagcggaccuacagcgaccggggcugggggaacggcugcgggcuguucggcaagggcuccaucgucgccugcgccaaguucacgugcgcgaagagcaugucccuguucgagguggaccagaccaagauccaguacgucauccgcgcccagcuccacgugggggccaagcaggagaacuggaacaccgacaucaagacccugaaguucgacgcccugagcggcagccaggagguggaguucaucggguacggcaaggccacgcucgagugccagguccagaccgcgguggacuucgggaacuccuacaucgccgagauggagaccgagagcuggaucguggaccggcagugggcccaggaccugacccugcccuggcaguccggcagcggcggggucuggcgcgagaugcaccaccucguggaguucgagcccccgcacgccgccacgauccgggugcuggcgcugggcaaccaggaggggucccucaagaccgcccugaccggcgccaugcgcgucaccaaggacacgaacgacaacaaccuguacaagcuccacgggggccacgugagcugccgggugaagcuguccgcccugacccucaagggcaccagcuacaagaucugcaccgacaagauguucuucgucaagaaccccacggacaccgggcacggcaccguggugaugcaggucaagguguccaagggggcgcccugccgcaucccggugaucgucgccgacgaccugaccgccgccaucaacaagggcauccuggugaccgugaacccgaucgccagcacgaacgacgacgagguccucaucgaggugaacccccccuucggcgacuccuacaucaucguggggcggggcgacagccgccugaccuaccaguggcacaaggagggguccagcaucggcaagcuguucacccagaccaugaagggggucgagcggcuggcggugaugggcgacacggccugggacuucuccagcgccggcggguucuucaccuccgugggcaaggggauccacaccgucuucggcagcgccuuccaggggcucuucggcggccugaacuggaucaccaaggugaucaugggggccgugcugaucugggucggcaucaacacgcgcaacaugaccauguccaugagcaugauccucgugggggugaucaugauguuccugagccugggcgucggggcggaccagggcugcgccaucaacuucggcaagugaggacuaguuauaagacugacuagcccgaugggccucccaacgggcccuccuccccuccuugcaccgagauuaauaaaaaaaaaaaaaaaaaaaaaaaaaaaaaaaaaaaaaaaaaaaaaaaaaaaaaaaaaaaaaaaaugcaucccccccccccccccccccccccccccccccaaaggcucuuuucagagccaccagaauu

SEQ ID NO: 2057 - RNA, 2293 nt, Artificial Sequence
  mRNA product Design i-3 comprising derived and/or modified sequence from YFV__NC_002031.1__X-SS-prMEdelstem_TM-JEV (polyprotein: aa92-681) (opt1)
gggagaaagcuuaccaugcggggccugagcucccgcaagcggcgcagccacgacgugcucaccguccaguuccugauccuggggaugcuccugaugaccggcggggugacgcuggugcggaagaaccgcuggcuccugcugaacgucaccuccgaggaccucggcaagaccuucagcguggggaccggcaacugcacgaccaacauccuggaggccaaguacuggugccccgacuccauggaguacaacugcccgaaccugagcccccgggaggagcccgacgacaucgacugcuggugcuacggcguggagaacguccgcguggccuacgggaagugcgacuccgcgggccggagccgccggucccgccgggccaucgaccuccccacccacgagaaccacgggcugaagacccgccaggagaaguggaugacgggccggaugggggagcgccagcugcagaagaucgagcggugguucgugcgcaacccguucuucgccgucaccgcccucaccaucgccuaccuggugggcagcaacaugacccagcggguggucaucgcgcugcucgugcuggccgugggccccgccuacuccgcccacugcaucgggaucacggaccgcgacuucaucgagggcguccacgggggcaccugggugagcgcgacccuggagcaggacaagugcgugaccgucauggcccccgacaagcccucccucgacaucagccuggagacgguggccaucgaccggccggccgaggugcgcaaggucugcuacaacgccgugcugacccacgugaagaucaacgacaagugccccuccaccggcgaggcgcaccucgccgaggagaacgagggggacaacgccugcaagcggaccuacagcgaccggggcugggggaacggcugcgggcuguucggcaagggcuccaucgucgccugcgccaaguucacgugcgcgaaguccaugagccuguucgagguggaccagaccaagauccaguacgucauccgcgcccagcuccacgugggggccaagcaggagaacuggaacaccgacaucaagacccugaaguucgacgcccugagcggcagccaggagguggaguucaucggguacggcaaggccacgcucgagugccagguccagaccgcgguggacuucgggaacuccuacaucgccgagauggagaccgagagcuggaucguggaccggcagugggcccaggaccugacccugcccuggcaguccggcagcggcggggucuggcgcgagaugcaccaccucguggaguucgagcccccgcacgccgccacgauccgggugcuggcgcugggcaaccaggaggggucccucaagaccgcccugaccggcgccaugcgcgucaccaaggacacgaacgacaacaaccuguacaagcuccacgggggccacgugagcugccgggugaagcuguccgcccugacccucaagggcaccagcuacaagaucugcaccgacaagauguucuucgucaagaaccccacggacaccgggcacggcaccguggugaugcaggucaagguguccaagggggcgcccugccgcaucccggugaucgucgccgacgaccugaccgccgccaucaacaagggcauccuggugaccgugaacccgaucgccagcacgaacgacgacgagguccucaucgaggugaacccccccuucggcgacuccuacaucaucguggggcggggcgacagccgccugaccuaccaguggcacaaggagggguccagcaucggcagcacccuggggaaggccuucuccaccacgcucaagggcgcccagcgccuggcggcccugggggacaccgccugggacuucggcagcaucgggggcguguucaacuccaucggccgggccguccaccagguguucgggggcgccuuccgcacccucuucgggggcaugagcuggaucacccaggggcugaugggcgcgcugcuccuguggaugggggugaacgcccgggaccgcuccaucgcccuggccuuccucgcgacgggcggcguccugguguuccuggccaccaacgugcacgccugaggacuaguuauaagacugacuagcccgaugggccucccaacgggcccuccuccccuccuugcaccgagauuaauaaaaaaaaaaaaaaaaaaaaaaaaaaaaaaaaaaaaaaaaaaaaaaaaaaaaaaaaaaaaaaaaugcaucccccccccccccccccccccccccccccccaaaggcucuuuucagagccaccagaauu

SEQ ID NO: 2058 - RNA, 2266 nt, Artificial Sequence
  mRNA product Design i-3 comprising derived and/or modified sequence from YFV__NC_002031.1__SSjev(V3)-prMEdelstem_TM-JEV (polyprotein: aa122-681) (opt1)
gggagaaagcuuaccaugaacgagggcagcaucauguggcuggccucccucgccguggucaucgcgugcgccggggccgugacgcuggugcggaagaaccgcuggcuccugcugaacgucaccuccgaggaccucggcaagaccuucagcguggggaccggcaacugcacgaccaacauccuggaggccaaguacuggugccccgacuccauggaguacaacugcccgaaccugagcccccgggaggagcccgacgacaucgacugcuggugcuacggcguggagaacguccgcguggccuacgggaagugcgacuccgcgggccggagccgccggucccgccgggccaucgaccuccccacccacgagaaccacgggcugaagacccgccaggagaaguggaugacgggccggaugggggagcgccagcugcagaagaucgagcggugguucgugcgcaacccguucuucgccgucaccgcccucaccaucgccuaccuggugggcagcaacaugacccagcggguggucaucgcgcugcucgugcuggccgugggccccgccuacuccgcccacugcaucgggaucacggaccgcgacuucaucgagggcguccacgggggcaccugggugagcgcgacccuggagcaggacaagugcgugaccgucauggcccccgacaagcccucccucgacaucagccuggagacgguggccaucgaccggccggccgaggugcgcaaggucugcuacaacgccgugcugacccacgugaagaucaacgacaagugccccuccaccggcgaggcgcaccucgccgaggagaacgagggggacaacgccugcaagcggaccuacagcgaccggggcugggggaacggcugcgggcuguucggcaagggcuccaucgucgccugcgccaaguucacgugcgcgaaguccaugagccuguucgagguggaccagaccaagauccaguacgucauccgcgcccagcuccacgugggggccaagcaggagaacuggaacaccgacaucaagacccugaaguucgacgcccugagcggcagccaggagguggaguucaucggguacggcaaggccacgcucgagugccagguccagaccgcgguggacuucgggaacuccuacaucgccgagauggagaccgagagcuggaucguggaccggcagugggcccaggaccugacccugcccuggcaguccggcagcggcggggucuggcgcgagaugcaccaccucguggaguucgagcccccgcacgccgccacgauccgggugcuggcgcugggcaaccaggaggggucccucaagaccgcccugaccggcgccaugcgcgucaccaaggacacgaacgacaacaaccuguacaagcuccacgggggccacgugagcugccgggugaagcuguccgcccugacccucaagggcaccagcuacaagaucugcaccgacaagauguucuucgucaagaaccccacggacaccgggcacggcaccguggugaugcaggucaagguguccaagggggcgcccugccgcaucccggugaucgucgccgacgaccugaccgccgccaucaacaagggcauccuggugaccgugaacccgaucgccagcacgaacgacgacgagguccucaucgaggugaacccccccuucggcgacuccuacaucaucguggggcggggcgacagccgccugaccuaccaguggcacaaggagggguccagcaucggcagcacccuggggaaggccuucuccaccacgcucaagggcgcccagcgccuggcggcccugggggacaccgccugggacuucggcagcaucgggggcguguucaacuccaucggccgggccguccaccagguguucgggggcgccuuccgcacccucuucgggggcaugagcuggaucacccaggggcugaugggcgcgcugcuccuguggaugggggugaacgcccgggaccgcuccaucgcccuggccuuccucgcgacgggcggcguccugguguuccuggccaccaacgugcacgccugaggacuaguuauaagacugacuagcccgaugggccucccaacgggcccuccuccccuccuugcaccgagauuaauaaaaaaaaaaaaaaaaaaaaaaaaaaaaaaaaaaaaaaaaaaaaaaaaaaaaaaaaaaaaaaaaugcaucccccccccccccccccccccccccccccccaaaggcucuuuucagagccaccagaauu

SEQ ID NO: 2059 - RNA, 2281 nt, Artificial Sequence
  mRNA product Design i-3 comprising derived and/or modified sequence from YFV__NC_002031.1__X-SS-prME (polyprotein: aa92-778) (opt1)
gggagaaagcuuaccaugcggggccugagcucccgcaagcggcgcagccacgacgugcucaccguccaguuccugauccuggggaugcuccugaugaccggcggggugacgcuggugcggaagaaccgcuggcuccugcugaacgucaccuccgaggaccucggcaagaccuucagcguggggaccggcaacugcacgaccaacauccuggaggccaaguacuggugccccgacuccauggaguacaacugcccgaaccugagcccccgggaggagcccgacgacaucgacugcuggugcuacggcguggagaacguccgcguggccuacgggaagugcgacuccgcgggccggagccgccggucccgccgggccaucgaccuccccacccacgagaaccacgggcugaagacccgccaggagaaguggaugacgggccggaugggggagcgccagcugcagaagaucgagcggugguucgugcgcaacccguucuucgccgucaccgcccucaccaucgccuaccuggugggcagcaacaugacccagcggguggucaucgcgcugcucgugcuggccgugggccccgccuacuccgcccacugcaucgggaucacggaccgcgacuucaucgagggcguccacgggggcaccugggugagcgcgacccuggagcaggacaagugcgugaccgucauggcccccgacaagcccucccucgacaucagccuggagacgguggccaucgaccggccggccgaggugcgcaaggucugcuacaacgccgugcugacccacgugaagaucaacgacaagugccccuccaccggcgaggcgcaccucgccgaggagaacgagggggacaacgccugcaagcggaccuacagcgaccggggcugggggaacggcugcgggcuguucggcaagggcuccaucgucgccugcgccaaguucacgugcgcgaaguccaugagccuguucgagguggaccagaccaagauccaguacgucauccgcgcccagcuccacgugggggccaagcaggagaacuggaacaccgacaucaagacccugaaguucgacgcccugagcggcagccaggagguggaguucaucggguacggcaaggccacgcucgagugccagguccagaccgcgguggacuucgggaacuccuacaucgccgagauggagaccgagagcuggaucguggaccggcagugggcccaggaccugacccugcccuggcaguccggcagcggcggggucuggcgcgagaugcaccaccucguggaguucgagcccccgcacgccgccacgauccgggugcuggcgcugggcaaccaggaggggucccucaagaccgcccugaccggcgccaugcgcgucaccaaggacacgaacgacaacaaccuguacaagcuccacgggggccacgugagcugccgggugaagcuguccgcccugacccucaagggcaccagcuacaagaucugcaccgacaagauguucuucgucaagaaccccacggacaccgggcacggcaccguggugaugcaggucaagguguccaagggggcgcccugccgcaucccggugaucgucgccgacgaccugaccgccgccaucaacaagggcauccuggugaccgugaacccgaucgccagcacgaacgacgacgagguccucaucgaggugaacccccccuucggcgacuccuacaucaucguggggcggggcgacagccgccugaccuaccaguggcacaaggagggguccagcaucggcaagcuguucacccagaccaugaagggggucgagcggcuggcggugaugggcgacacggccugggacuucuccagcgccggcggguucuucaccuccgugggcaaggggauccacaccgucuucggcagcgccuuccaggggcuguucggcggccucaacuggaucaccaaggugaucaugggggccgugcugaucugggucggcaucaacacgcgcaacaugaccauguccaugagcaugauccucgugggggugaucaugauguuccugagccugggcgucggggcgugaggacuaguuauaagacugacuagcccgaugggccucccaacgggcccuccuccccuccuugcaccgagauuaauaaaaaaaaaaaaaaaaaaaaaaaaaaaaaaaaaaaaaaaaaaaaaaaaaaaaaaaaaaaaaaaaugcaucccccccccccccccccccccccccccccccaaaggcucuuuucagagccaccagaauu

SEQ ID NO: 2060 - RNA, 2284 nt, Artificial Sequence
  mRNA product Design i-3 comprising derived and/or modified sequence from YFV__NC_002031.1__SSjev(V3)-prME-XX (polyprotein: aa122-788) (opt1)
gggagaaagcuuaccaugaacgagggcagcaucauguggcuggccucccucgccguggucaucgcgugcgccggggccgugacgcuggugcggaagaaccgcuggcuccugcugaacgucaccuccgaggaccucggcaagaccuucagcguggggaccggcaacugcacgaccaacauccuggaggccaaguacuggugccccgacuccauggaguacaacugcccgaaccugagcccccgggaggagcccgacgacaucgacugcuggugcuacggcguggagaacguccgcguggccuacgggaagugcgacuccgcgggccggagccgccggucccgccgggccaucgaccuccccacccacgagaaccacgggcugaagacccgccaggagaaguggaugacgggccggaugggggagcgccagcugcagaagaucgagcggugguucgugcgcaacccguucuucgccgucaccgcccucaccaucgccuaccuggugggcagcaacaugacccagcggguggucaucgcgcugcucgugcuggccgugggccccgccuacuccgcccacugcaucgggaucacggaccgcgacuucaucgagggcguccacgggggcaccugggugagcgcgacccuggagcaggacaagugcgugaccgucauggcccccgacaagcccucccucgacaucagccuggagacgguggccaucgaccggccggccgaggugcgcaaggucugcuacaacgccgugcugacccacgugaagaucaacgacaagugccccuccaccggcgaggcgcaccucgccgaggagaacgagggggacaacgccugcaagcggaccuacagcgaccggggcugggggaacggcugcgggcuguucggcaagggcuccaucgucgccugcgccaaguucacgugcgcgaaguccaugagccuguucgagguggaccagaccaagauccaguacgucauccgcgcccagcuccacgugggggccaagcaggagaacuggaacaccgacaucaagacccugaaguucgacgcccugagcggcagccaggagguggaguucaucggguacggcaaggccacgcucgagugccagguccagaccgcgguggacuucgggaacuccuacaucgccgagauggagaccgagagcuggaucguggaccggcagugggcccaggaccugacccugcccuggcaguccggcagcggcggggucuggcgcgagaugcaccaccucguggaguucgagcccccgcacgccgccacgauccgggugcuggcgcugggcaaccaggaggggucccucaagaccgcccugaccggcgccaugcgcgucaccaaggacacgaacgacaacaaccuguacaagcuccacgggggccacgugagcugccgggugaagcuguccgcccugacccucaagggcaccagcuacaagaucugcaccgacaagauguucuucgucaagaaccccacggacaccgggcacggcaccguggugaugcaggucaagguguccaagggggcgcccugccgcaucccggugaucgucgccgacgaccugaccgccgccaucaacaagggcauccuggugaccgugaacccgaucgccagcacgaacgacgacgagguccucaucgaggugaacccccccuucggcgacuccuacaucaucguggggcggggcgacagccgccugaccuaccaguggcacaaggagggguccagcaucggcaagcuguucacccagaccaugaagggggucgagcggcuggcggugaugggcgacacggccugggacuucuccagcgccggcggguucuucaccuccgugggcaaggggauccacaccgucuucggcagcgccuuccaggggcuguucggcggccucaacuggaucaccaaggugaucaugggggccgugcugaucugggucggcaucaacacgcgcaacaugaccauguccaugagcaugauccucgugggggugaucaugauguuccugagccugggcgucggggcggaccagggcugcgccaucaacuucggcaagugaggacuaguuauaagacugacuagcccgaugggccucccaacgggcccuccuccccuccuugcaccgagauuaauaaaaaaaaaaaaaaaaaaaaaaaaaaaaaaaaaaaaaaaaaaaaaaaaaaaaaaaaaaaaaaaaugcaucccccccccccccccccccccccccccccccaaaggcucuuuucagagccaccagaauu

SEQ ID NO: 2061 - RNA, 2293 nt, Artificial Sequence
  mRNA product Design i-3 comprising derived and/or modified sequence from YFV__NC_002031.1__X-SS-prMEdelstem_TM-JEV (polyprotein: aa92-681) (opt1)
gggagaaagcuuaccaugcggggccugagcucccgcaagcggcgcagccacgacgugcucaccguccaguuccugauccuggggaugcuccugaugaccggcggggugacgcuggugcggaagaaccgcuggcuccugcugaacgucaccuccgaggaccucggcaagaccuucagcguggggaccggcaacugcacgaccaacauccuggaggccaaguacuggugccccgacuccauggaguacaacugccccaaccugagcccccgggaggagcccgacgacaucgacugcuggugcuacggcguggagaacguccgcguggccuacgggaagugcgacuccgcgggccggagccgccggucccgccgggccaucgaccuccccacccacgagaaccacgggcugaagacccgccaggagaaguggaugacgggccggaugggggagcgccagcugcagaagaucgagcggugguucgugcgcaacccguucuucgccgucaccgcccucaccaucgccuaccuggugggcagcaacaugacccagcggguggucaucgcgcugcucgugcuggccgugggccccgccuacuccgcccacugcaucgggaucacggaccgcgacuucaucgagggcguccacgggggcaccugggugagcgcgacccuggagcaggacaagugcgugaccgucauggcccccgacaagcccucccucgacaucagccuggagacgguggccaucgaccggccggccgaggugcgcaaggucugcuacaacgccgugcugacccacgugaagaucaacgacaagugccccuccaccggcgaggcgcaccucgccgaggagaacgagggggacaacgccugcaagcggaccuacagcgaccggggcugggggaacggcugcgggcuguucggcaagggcuccaucgucgccugcgccaaguucacgugcgcgaaguccaugagccuguucgagguggaccagaccaagauccaguacgucauccgcgcccagcuccacgugggggccaagcaggagaacuggaacaccgacaucaagacccugaaguucgacgcccugagcggcagccaggagguggaguucaucggguacggcaaggccacgcucgagugccagguccagaccgcgguggacuucgggaacuccuacaucgccgagauggagaccgagagcuggaucguggaccggcagugggcccaggaccugacccugcccuggcaguccggcagcggcggggucuggcgcgagaugcaccaccucguggaguucgagcccccgcacgccgccacgauccgggugcuggcgcugggcaaccaggaggggucccucaagaccgcccugaccggcgccaugcgcgucaccaaggacacgaacgacaacaaccuguacaagcuccacgggggccacgugagcugccgggugaagcuguccgcccugacccucaagggcaccagcuacaagaucugcaccgacaagauguucuucgucaagaaccccacggacaccgggcacggcaccguggugaugcaggucaagguguccaagggggcgcccugccgcaucccggugaucgucgccgacgaccugaccgccgccaucaacaagggcauccuggugaccgugaacccgaucgccagcacgaacgacgacgagguccucaucgaggugaacccgcccuucggcgacuccuacaucaucguggggcggggcgacagccgccugaccuaccaguggcacaaggagggguccagcaucggaagcacgcugggcaaggccuuuucaacaacuuugaagggagcucaaagacuggcagcguugggcgacacagccugggacuuuggcucuauuggaggggucuucaacuccauagguagagccguucaccaaguguuuggaggugccuucagaacacucuuugggggaaugucuuggaucacacaagggcuaaugggugcccuacugcucuggaugggcgucaacgcacgagaccgaucaauugcuuuggccuucuuagccacaggaggugugcucguguucuuagcgaccaaugugcacgccugaggacuaguuauaagacugacuagcccgaugggccucccaacgggcccuccuccccuccuugcaccgagauuaauaaaaaaaaaaaaaaaaaaaaaaaaaaaaaaaaaaaaaaaaaaaaaaaaaaaaaaaaaaaaaaaaugcaucccccccccccccccccccccccccccccccaaaggcucuuuucagagccaccagaauu

SEQ ID NO: 2062 - RNA, 2266 nt, Artificial Sequence
  mRNA product Design i-3 comprising derived and/or modified sequence from YFV__NC_002031.1__SSjev(V3)-prMEdelstem_TM-JEV (polyprotein: aa122-681) (opt1)
gggagaaagcuuaccaugaacgagggcagcaucauguggcuggccucccucgccguggucaucgcgugcgccggggccgugacgcuggugcggaagaaccgcuggcuccugcugaacgucaccuccgaggaccucggcaagaccuucagcguggggaccggcaacugcacgaccaacauccuggaggccaaguacuggugccccgacuccauggaguacaacugccccaaccugagcccccgggaggagcccgacgacaucgacugcuggugcuacggcguggagaacguccgcguggccuacgggaagugcgacuccgcgggccggagccgccggucccgccgggccaucgaccuccccacccacgagaaccacgggcugaagacccgccaggagaaguggaugacgggccggaugggggagcgccagcugcagaagaucgagcggugguucgugcgcaacccguucuucgccgucaccgcccucaccaucgccuaccuggugggcagcaacaugacccagcggguggucaucgcgcugcucgugcuggccgugggccccgccuacuccgcccacugcaucgggaucacggaccgcgacuucaucgagggcguccacgggggcaccugggugagcgcgacccuggagcaggacaagugcgugaccgucauggcccccgacaagcccucccucgacaucagccuggagacgguggccaucgaccggccggccgaggugcgcaaggucugcuacaacgccgugcugacccacgugaagaucaacgacaagugccccuccaccggcgaggcgcaccucgccgaggagaacgagggggacaacgccugcaagcggaccuacagcgaccggggcugggggaacggcugcgggcuguucggcaagggcuccaucgucgccugcgccaaguucacgugcgcgaaguccaugagccuguucgagguggaccagaccaagauccaguacgucauccgcgcccagcuccacgugggggccaagcaggagaacuggaacaccgacaucaagacccugaaguucgacgcccugagcggcagccaggagguggaguucaucggguacggcaaggccacgcucgagugccagguccagaccgcgguggacuucgggaacuccuacaucgccgagauggagaccgagagcuggaucguggaccggcagugggcccaggaccugacccugcccuggcaguccggcagcggcggggucuggcgcgagaugcaccaccucguggaguucgagcccccgcacgccgccacgauccgggugcuggcgcugggcaaccaggaggggucccucaagaccgcccugaccggcgccaugcgcgucaccaaggacacgaacgacaacaaccuguacaagcuccacgggggccacgugagcugccgggugaagcuguccgcccugacccucaagggcaccagcuacaagaucugcaccgacaagauguucuucgucaagaaccccacggacaccgggcacggcaccguggugaugcaggucaagguguccaagggggcgcccugccgcaucccggugaucgucgccgacgaccugaccgccgccaucaacaagggcauccuggugaccgugaacccgaucgccagcacgaacgacgacgagguccucaucgaggugaacccgcccuucggcgacuccuacaucaucguggggcggggcgacagccgccugaccuaccaguggcacaaggagggguccagcaucggcagcacccuggggaaggccuucuccaccacgcucaagggcgcccagcgccuggcggcccugggggacaccgccugggacuucggcagcaucgggggcguguucaacuccaucggccgggccguccaccagguguucgggggcgccuuccgcacccucuucgggggcaugagcuggaucacccaggggcugaugggcgcgcugcuccuguggaugggggugaacgcccgggaccgcuccaucgcccuggccuuccucgcgacgggcggcguccugguguuccuggccaccaacgugcacgccugaggacuaguuauaagacugacuagcccgaugggccucccaacgggcccuccuccccuccuugcaccgagauuaauaaaaaaaaaaaaaaaaaaaaaaaaaaaaaaaaaaaaaaaaaaaaaaaaaaaaaaaaaaaaaaaaugcaucccccccccccccccccccccccccccccccaaaggcucuuuucagagccaccagaauu

SEQ ID NO: 2063 - RNA, 2281 nt, Artificial Sequence
  mRNA product Design i-3 comprising derived and/or modified sequence from YFV__NC_002031.1__X-SS-prME (polyprotein: aa92-778) (opt1)
gggagaaagcuuaccaugcggggccugagcucccgcaagcggcgcagccacgacgugcucaccguccaguuccugauccuggggaugcuccugaugaccggcggggugacgcuggugcggaagaaccgcuggcuccugcugaacgucaccuccgaggaccucggcaagaccuucagcguggggaccggcaacugcacgaccaacauccuggaggccaaguacuggugccccgacuccauggaguacaacugccccaaccugagcccccgggaggagcccgacgacaucgacugcuggugcuacggcguggagaacguccgcguggccuacgggaagugcgacuccgcgggccggagccgccggucccgccgggccaucgaccuccccacccacgagaaccacgggcugaagacccgccaggagaaguggaugacgggccggaugggggagcgccagcugcagaagaucgagcggugguucgugcgcaacccguucuucgccgucaccgcccucaccaucgccuaccuggugggcagcaacaugacccagcggguggucaucgcgcugcucgugcuggccgugggccccgccuacuccgcccacugcaucgggaucacggaccgcgacuucaucgagggcguccacgggggcaccugggugagcgcgacccuggagcaggacaagugcgugaccgucauggcccccgacaagcccucccucgacaucagccuggagacgguggccaucgaccggccggccgaggugcgcaaggucugcuacaacgccgugcugacccacgugaagaucaacgacaagugccccuccaccggcgaggcgcaccucgccgaggagaacgagggggacaacgccugcaagcggaccuacagcgaccggggcugggggaacggcugcgggcuguucggcaagggcuccaucgucgccugcgccaaguucacgugcgcgaaguccaugagccuguucgagguggaccagaccaagauccaguacgucauccgcgcccagcuccacgugggggccaagcaggagaacuggaacaccgacaucaagacccugaaguucgacgcccugagcggcagccaggagguggaguucaucggguacggcaaggccacgcucgagugccagguccagaccgcgguggacuucgggaacuccuacaucgccgagauggagaccgagagcuggaucguggaccggcagugggcccaggaccugacccugcccuggcaguccggcagcggcggggucuggcgcgagaugcaccaccucguggaguucgagcccccgcacgccgccacgauccgggugcuggcgcugggcaaccaggaggggucccucaagaccgcccugaccggcgccaugcgcgucaccaaggacacgaacgacaacaaccuguacaagcuccacgggggccacgugagcugccgggugaagcuguccgcccugacccucaagggcaccagcuacaagaucugcaccgacaagauguucuucgucaagaaccccacggacaccgggcacggcaccguggugaugcaggucaagguguccaagggggcgcccugccgcaucccggugaucgucgccgacgaccugaccgccgccaucaacaagggcauccuggugaccgugaacccgaucgccagcacgaacgacgacgagguccucaucgaggugaacccgcccuucggcgacuccuacaucaucguggggcggggcgacagccgccugaccuaccaguggcacaaggagggguccagcaucggcaagcuguucacccagaccaugaagggggucgagcggcuggcggugaugggcgacacggccugggacuucuccagcgccggcggguucuucaccuccgugggcaaggggauccacaccgucuucggcagcgccuuccaggggcuguucggcggccucaacuggaucaccaaggugaucaugggggccgugcugaucugggucggcaucaacacgcgcaacaugaccauguccaugagcaugauccucgugggggugaucaugauguuccugagccugggcgucggggcgugaggacuaguuauaagacugacuagcccgaugggccucccaacgggcccuccuccccuccuugcaccgagauuaauaaaaaaaaaaaaaaaaaaaaaaaaaaaaaaaaaaaaaaaaaaaaaaaaaaaaaaaaaaaaaaaaugcaucccccccccccccccccccccccccccccccaaaggcucuuuucagagccaccagaauu

SEQ ID NO: 2064 - RNA, 2284 nt, Artificial Sequence
  mRNA product Design i-3 comprising derived and/or modified sequence from YFV__NC_002031.1__SSjev(V3)-prME-XX (polyprotein: aa122-788) (opt1)
gggagaaagcuuaccaugaacgagggcagcaucauguggcuggccucccucgccguggucaucgcgugcgccggggccgugacgcuggugcggaagaaccgcuggcuccugcugaacgucaccuccgaggaccucggcaagaccuucagcguggggaccggcaacugcacgaccaacauccuggaggccaaguacuggugccccgacuccauggaguacaacugccccaaccugagcccccgggaggagcccgacgacaucgacugcuggugcuacggcguggagaacguccgcguggccuacgggaagugcgacuccgcgggccggagccgccggucccgccgggccaucgaccuccccacccacgagaaccacgggcugaagacccgccaggagaaguggaugacgggccggaugggggagcgccagcugcagaagaucgagcggugguucgugcgcaacccguucuucgccgucaccgcccucaccaucgccuaccuggugggcagcaacaugacccagcggguggucaucgcgcugcucgugcuggccgugggccccgccuacuccgcccacugcaucgggaucacggaccgcgacuucaucgagggcguccacgggggcaccugggugagcgcgacccuggagcaggacaagugcgugaccgucauggcccccgacaagcccucccucgacaucagccuggagacgguggccaucgaccggccggccgaggugcgcaaggucugcuacaacgccgugcugacccacgugaagaucaacgacaagugccccuccaccggcgaggcgcaccucgccgaggagaacgagggggacaacgccugcaagcggaccuacagcgaccggggcugggggaacggcugcgggcuguucggcaagggcuccaucgucgccugcgccaaguucacgugcgcgaaguccaugagccuguucgagguggaccagaccaagauccaguacgucauccgcgcccagcuccacgugggggccaagcaggagaacuggaacaccgacaucaagacccugaaguucgacgcccugagcggcagccaggagguggaguucaucggguacggcaaggccacgcucgagugccagguccagaccgcgguggacuucgggaacuccuacaucgccgagauggagaccgagagcuggaucguggaccggcagugggcccaggaccugacccugcccuggcaguccggcagcggcggggucuggcgcgagaugcaccaccucguggaguucgagcccccgcacgccgccacgauccgggugcuggcgcugggcaaccaggaggggucccucaagaccgcccugaccggcgccaugcgcgucaccaaggacacgaacgacaacaaccuguacaagcuccacgggggccacgugagcugccgggugaagcuguccgcccugacccucaagggcaccagcuacaagaucugcaccgacaagauguucuucgucaagaaccccacggacaccgggcacggcaccguggugaugcaggucaagguguccaagggggcgcccugccgcaucccggugaucgucgccgacgaccugaccgccgccaucaacaagggcauccuggugaccgugaacccgaucgccagcacgaacgacgacgagguccucaucgaggugaacccgcccuucggcgacuccuacaucaucguggggcggggcgacagccgccugaccuaccaguggcacaaggagggguccagcaucggcaagcuguucacccagaccaugaagggggucgagcggcuggcggugaugggcgacacggccugggacuucuccagcgccggcggguucuucaccuccgugggcaaggggauccacaccgucuucggcagcgccuuccaggggcuguucggcggccucaacuggaucaccaaggugaucaugggggccgugcugaucugggucggcaucaacacgcgcaacaugaccauguccaugagcaugauccucgugggggugaucaugauguuccugagccugggcgucggggcggaccagggcugcgccaucaacuucggcaagugaggacuaguuauaagacugacuagcccgaugggccucccaacgggcccuccuccccuccuugcaccgagauuaauaaaaaaaaaaaaaaaaaaaaaaaaaaaaaaaaaaaaaaaaaaaaaaaaaaaaaaaaaaaaaaaaugcaucccccccccccccccccccccccccccccccaaaggcucuuuucagagccaccagaauu

SEQ ID NO: 2065 - RNA, 2293 nt, Artificial Sequence
  mRNA product Design i-3 comprising derived and/or modified sequence from YFV__NC_002031.1__X-SS-prMEdelstem_TM-JEV (polyprotein: aa92-681) (opt2)
gggagaaagcuuaccaugcgcggccucuccucccgcaagcgccgcucccacgacguccucaccguccaguuccucauccucggcaugcuccucaugaccggcggcgucacccucguccgcaagaaccgcuggcuccuccucaacgucaccuccgaggaccucggcaagaccuucuccgucggcaccggcaacugcaccaccaacauccucgaggccaaguacuggugccccgacuccauggaguacaacugccccaaccucuccccccgcgaggagcccgacgacaucgacugcuggugcuacggcgucgagaacguccgcgucgccuacggcaagugcgacuccgccggccgcucccgccgcucccgccgcgccaucgaccuccccacccacgagaaccacggccucaagacccgccaggagaaguggaugaccggccgcaugggcgagcgccagcuccagaagaucgagcgcugguucguccgcaaccccuucuucgccgucaccgcccucaccaucgccuaccucgucggcuccaacaugacccagcgcgucgucaucgcccuccucguccucgccgucggccccgccuacuccgcccacugcaucggcaucaccgaccgcgacuucaucgagggcguccacggcggcaccugggucuccgccacccucgagcaggacaagugcgucaccgucauggcccccgacaagcccucccucgacaucucccucgagaccgucgccaucgaccgccccgccgagguccgcaaggucugcuacaacgccguccucacccacgucaagaucaacgacaagugccccuccaccggcgaggcccaccucgccgaggagaacgagggcgacaacgccugcaagcgcaccuacuccgaccgcggcuggggcaacggcugcggccucuucggcaagggcuccaucgucgccugcgccaaguucaccugcgccaaguccaugucccucuucgaggucgaccagaccaagauccaguacgucauccgcgcccagcuccacgucggcgccaagcaggagaacuggaacaccgacaucaagacccucaaguucgacgcccucuccggcucccaggaggucgaguucaucggcuacggcaaggccacccucgagugccagguccagaccgccgucgacuucggcaacuccuacaucgccgagauggagaccgaguccuggaucgucgaccgccagugggcccaggaccucacccuccccuggcaguccggcuccggcggcgucuggcgcgagaugcaccaccucgucgaguucgagcccccccacgccgccaccauccgcguccucgcccucggcaaccaggagggcucccucaagaccgcccucaccggcgccaugcgcgucaccaaggacaccaacgacaacaaccucuacaagcuccacggcggccacgucuccugccgcgucaagcucuccgcccucacccucaagggcaccuccuacaagaucugcaccgacaagauguucuucgucaagaaccccaccgacaccggccacggcaccgucgucaugcaggucaaggucuccaagggcgcccccugccgcauccccgucaucgucgccgacgaccucaccgccgccaucaacaagggcauccucgucaccgucaaccccaucgccuccaccaacgacgacgagguccucaucgaggucaacccccccuucggcgacuccuacaucaucgucggccgcggcgacucccgccucaccuaccaguggcacaaggagggcuccuccaucggcuccacccucggcaaggccuucuccaccacccucaagggcgcccagcgccucgccgcccucggcgacaccgccugggacuucggcuccaucggcggcgucuucaacuccaucggccgcgccguccaccaggucuucggcggcgccuuccgcacccucuucggcggcauguccuggaucacccagggccucaugggcgcccuccuccucuggaugggcgucaacgcccgcgaccgcuccaucgcccucgccuuccucgccaccggcggcguccucgucuuccucgccaccaacguccacgccugaggacuaguuauaagacugacuagcccgaugggccucccaacgggcccuccuccccuccuugcaccgagauuaauaaaaaaaaaaaaaaaaaaaaaaaaaaaaaaaaaaaaaaaaaaaaaaaaaaaaaaaaaaaaaaaaugcaucccccccccccccccccccccccccccccccaaaggcucuuuucagagccaccagaauu

SEQ ID NO: 2066 - RNA, 2266 nt, Artificial Sequence
  mRNA product Design i-3 comprising derived and/or modified sequence from YFV__NC_002031.1__SSjev(V3)-prMEdelstem_TM-JEV (polyprotein: aa122-681) (opt2)
gggagaaagcuuaccaugaacgagggcuccaucauguggcucgccucccucgccgucgucaucgccugcgccggcgccgucacccucguccgcaagaaccgcuggcuccuccucaacgucaccuccgaggaccucggcaagaccuucuccgucggcaccggcaacugcaccaccaacauccucgaggccaaguacuggugccccgacuccauggaguacaacugccccaaccucuccccccgcgaggagcccgacgacaucgacugcuggugcuacggcgucgagaacguccgcgucgccuacggcaagugcgacuccgccggccgcucccgccgcucccgccgcgccaucgaccuccccacccacgagaaccacggccucaagacccgccaggagaaguggaugaccggccgcaugggcgagcgccagcuccagaagaucgagcgcugguucguccgcaaccccuucuucgccgucaccgcccucaccaucgccuaccucgucggcuccaacaugacccagcgcgucgucaucgcccuccucguccucgccgucggccccgccuacuccgcccacugcaucggcaucaccgaccgcgacuucaucgagggcguccacggcggcaccugggucuccgccacccucgagcaggacaagugcgucaccgucauggcccccgacaagcccucccucgacaucucccucgagaccgucgccaucgaccgccccgccgagguccgcaaggucugcuacaacgccguccucacccacgucaagaucaacgacaagugccccuccaccggcgaggcccaccucgccgaggagaacgagggcgacaacgccugcaagcgcaccuacuccgaccgcggcuggggcaacggcugcggccucuucggcaagggcuccaucgucgccugcgccaaguucaccugcgccaaguccaugucccucuucgaggucgaccagaccaagauccaguacgucauccgcgcccagcuccacgucggcgccaagcaggagaacuggaacaccgacaucaagacccucaaguucgacgcccucuccggcucccaggaggucgaguucaucggcuacggcaaggccacccucgagugccagguccagaccgccgucgacuucggcaacuccuacaucgccgagauggagaccgaguccuggaucgucgaccgccagugggcccaggaccucacccuccccuggcaguccggcuccggcggcgucuggcgcgagaugcaccaccucgucgaguucgagcccccccacgccgccaccauccgcguccucgcccucggcaaccaggagggcucccucaagaccgcccucaccggcgccaugcgcgucaccaaggacaccaacgacaacaaccucuacaagcuccacggcggccacgucuccugccgcgucaagcucuccgcccucacccucaagggcaccuccuacaagaucugcaccgacaagauguucuucgucaagaaccccaccgacaccggccacggcaccgucgucaugcaggucaaggucuccaagggcgcccccugccgcauccccgucaucgucgccgacgaccucaccgccgccaucaacaagggcauccucgucaccgucaaccccaucgccuccaccaacgacgacgagguccucaucgaggucaacccccccuucggcgacuccuacaucaucgucggccgcggcgacucccgccucaccuaccaguggcacaaggagggcuccuccaucggcuccacccucggcaaggccuucuccaccacccucaagggcgcccagcgccucgccgcccucggcgacaccgccugggacuucggcuccaucggcggcgucuucaacuccaucggccgcgccguccaccaggucuucggcggcgccuuccgcacccucuucggcggcauguccuggaucacccagggccucaugggcgcccuccuccucuggaugggcgucaacgcccgcgaccgcuccaucgcccucgccuuccucgccaccggcggcguccucgucuuccucgccaccaacguccacgccugaggacuaguuauaagacugacuagcccgaugggccucccaacgggcccuccuccccuccuugcaccgagauuaauaaaaaaaaaaaaaaaaaaaaaaaaaaaaaaaaaaaaaaaaaaaaaaaaaaaaaaaaaaaaaaaaugcaucccccccccccccccccccccccccccccccaaaggcucuuuucagagccaccagaauu

SEQ ID NO: 2067 - RNA, 2281 nt, Artificial Sequence
  mRNA product Design i-3 comprising derived and/or modified sequence from YFV__NC_002031.1__X-SS-prME (polyprotein: aa92-778) (opt2)
gggagaaagcuuaccaugcgcggccucuccucccgcaagcgccgcucccacgacguccucaccguccaguuccucauccucggcaugcuccucaugaccggcggcgucacccucguccgcaagaaccgcuggcuccuccucaacgucaccuccgaggaccucggcaagaccuucuccgucggcaccggcaacugcaccaccaacauccucgaggccaaguacuggugccccgacuccauggaguacaacugccccaaccucuccccccgcgaggagcccgacgacaucgacugcuggugcuacggcgucgagaacguccgcgucgccuacggcaagugcgacuccgccggccgcucccgccgcucccgccgcgccaucgaccuccccacccacgagaaccacggccucaagacccgccaggagaaguggaugaccggccgcaugggcgagcgccagcuccagaagaucgagcgcugguucguccgcaaccccuucuucgccgucaccgcccucaccaucgccuaccucgucggcuccaacaugacccagcgcgucgucaucgcccuccucguccucgccgucggccccgccuacuccgcccacugcaucggcaucaccgaccgcgacuucaucgagggcguccacggcggcaccugggucuccgccacccucgagcaggacaagugcgucaccgucauggcccccgacaagcccucccucgacaucucccucgagaccgucgccaucgaccgccccgccgagguccgcaaggucugcuacaacgccguccucacccacgucaagaucaacgacaagugccccuccaccggcgaggcccaccucgccgaggagaacgagggcgacaacgccugcaagcgcaccuacuccgaccgcggcuggggcaacggcugcggccucuucggcaagggcuccaucgucgccugcgccaaguucaccugcgccaaguccaugucccucuucgaggucgaccagaccaagauccaguacgucauccgcgcccagcuccacgucggcgccaagcaggagaacuggaacaccgacaucaagacccucaaguucgacgcccucuccggcucccaggaggucgaguucaucggcuacggcaaggccacccucgagugccagguccagaccgccgucgacuucggcaacuccuacaucgccgagauggagaccgaguccuggaucgucgaccgccagugggcccaggaccucacccuccccuggcaguccggcuccggcggcgucuggcgcgagaugcaccaccucgucgaguucgagcccccccacgccgccaccauccgcguccucgcccucggcaaccaggagggcucccucaagaccgcccucaccggcgccaugcgcgucaccaaggacaccaacgacaacaaccucuacaagcuccacggcggccacgucuccugccgcgucaagcucuccgcccucacccucaagggcaccuccuacaagaucugcaccgacaagauguucuucgucaagaaccccaccgacaccggccacggcaccgucgucaugcaggucaaggucuccaagggcgcccccugccgcauccccgucaucgucgccgacgaccucaccgccgccaucaacaagggcauccucgucaccgucaaccccaucgccuccaccaacgacgacgagguccucaucgaggucaacccccccuucggcgacuccuacaucaucgucggccgcggcgacucccgccucaccuaccaguggcacaaggagggcuccuccaucggcaagcucuucacccagaccaugaagggcgucgagcgccucgccgucaugggcgacaccgccugggacuucuccuccgccggcggcuucuucaccuccgucggcaagggcauccacaccgucuucggcuccgccuuccagggccucuucggcggccucaacuggaucaccaaggucaucaugggcgccguccucaucugggucggcaucaacacccgcaacaugaccauguccauguccaugauccucgucggcgucaucaugauguuccucucccucggcgucggcgccugaggacuaguuauaagacugacuagcccgaugggccucccaacgggcccuccuccccuccuugcaccgagauuaauaaaaaaaaaaaaaaaaaaaaaaaaaaaaaaaaaaaaaaaaaaaaaaaaaaaaaaaaaaaaaaaaugcaucccccccccccccccccccccccccccccccaaaggcucuuuucagagccaccagaauu

SEQ ID NO: 2068 - RNA, 2284 nt, Artificial Sequence
  mRNA product Design i-3 comprising derived and/or modified sequence from YFV__NC_002031.1__SSjev(V3)-prME-XX (polyprotein: aa122-788) (opt2)
gggagaaagcuuaccaugaacgagggcuccaucauguggcucgccucccucgccgucgucaucgccugcgccggcgccgucacccucguccgcaagaaccgcuggcuccuccucaacgucaccuccgaggaccucggcaagaccuucuccgucggcaccggcaacugcaccaccaacauccucgaggccaaguacuggugccccgacuccauggaguacaacugccccaaccucuccccccgcgaggagcccgacgacaucgacugcuggugcuacggcgucgagaacguccgcgucgccuacggcaagugcgacuccgccggccgcucccgccgcucccgccgcgccaucgaccuccccacccacgagaaccacggccucaagacccgccaggagaaguggaugaccggccgcaugggcgagcgccagcuccagaagaucgagcgcugguucguccgcaaccccuucuucgccgucaccgcccucaccaucgccuaccucgucggcuccaacaugacccagcgcgucgucaucgcccuccucguccucgccgucggccccgccuacuccgcccacugcaucggcaucaccgaccgcgacuucaucgagggcguccacggcggcaccugggucuccgccacccucgagcaggacaagugcgucaccgucauggcccccgacaagcccucccucgacaucucccucgagaccgucgccaucgaccgccccgccgagguccgcaaggucugcuacaacgccguccucacccacgucaagaucaacgacaagugccccuccaccggcgaggcccaccucgccgaggagaacgagggcgacaacgccugcaagcgcaccuacuccgaccgcggcuggggcaacggcugcggccucuucggcaagggcuccaucgucgccugcgccaaguucaccugcgccaaguccaugucccucuucgaggucgaccagaccaagauccaguacgucauccgcgcccagcuccacgucggcgccaagcaggagaacuggaacaccgacaucaagacccucaaguucgacgcccucuccggcucccaggaggucgaguucaucggcuacggcaaggccacccucgagugccagguccagaccgccgucgacuucggcaacuccuacaucgccgagauggagaccgaguccuggaucgucgaccgccagugggcccaggaccucacccuccccuggcaguccggcuccggcggcgucuggcgcgagaugcaccaccucgucgaguucgagcccccccacgccgccaccauccgcguccucgcccucggcaaccaggagggcucccucaagaccgcccucaccggcgccaugcgcgucaccaaggacaccaacgacaacaaccucuacaagcuccacggcggccacgucuccugccgcgucaagcucuccgcccucacccucaagggcaccuccuacaagaucugcaccgacaagauguucuucgucaagaaccccaccgacaccggccacggcaccgucgucaugcaggucaaggucuccaagggcgcccccugccgcauccccgucaucgucgccgacgaccucaccgccgccaucaacaagggcauccucgucaccgucaaccccaucgccuccaccaacgacgacgagguccucaucgaggucaacccccccuucggcgacuccuacaucaucgucggccgcggcgacucccgccucaccuaccaguggcacaaggagggcuccuccaucggcaagcucuucacccagaccaugaagggcgucgagcgccucgccgucaugggcgacaccgccugggacuucuccuccgccggcggcuucuucaccuccgucggcaagggcauccacaccgucuucggcuccgccuuccagggccucuucggcggccucaacuggaucaccaaggucaucaugggcgccguccucaucugggucggcaucaacacccgcaacaugaccauguccauguccaugauccucgucggcgucaucaugauguuccucucccucggcgucggcgccgaccagggcugcgccaucaacuucggcaagugaggacuaguuauaagacugacuagcccgaugggccucccaacgggcccuccuccccuccuugcaccgagauuaauaaaaaaaaaaaaaaaaaaaaaaaaaaaaaaaaaaaaaaaaaaaaaaaaaaaaaaaaaaaaaaaaugcaucccccccccccccccccccccccccccccccaaaggcucuuuucagagccaccagaauu

SEQ ID NO: 2069 - RNA, 2293 nt, Artificial Sequence
  mRNA product Design i-3 comprising derived and/or modified sequence from YFV__NC_002031.1__X-SS-prMEdelstem_TM-JEV (polyprotein: aa92-681) (opt3)
gggagaaagcuuaccaugagaggccugagcuccaggaagcggcgcucucacgacgugcucaccguccaguuccuuauccuggggauguuguuaaugacaggagguguuacucuggugcguaaaaaccgauggcuacuccugaauguaacgucagaggaucuuggcaagaccuuuaguguggggacaggaaacugcacuaccaauauucuggaagccaaauacuggugucccgacagcauggaguauaacugcccuaauuuguccccaagagaggaaccggaugacauagauuguuggugcuacggcgucgaaaacgugaggguugcuuaugguaagugugacucugcagggcggucgcgcagaucaaggcgggccaucgaucuccccacacaugagaaucacggacugaaaacccgccaagagaaguggaugacuggccgaaugggcgaaagacagcugcagaagauugagaggugguucgugcggaacccuuucuucgcggucacagcucucaccaucgccuacuuaguggggagcaauaugacgcagcguguaguuauugcacugcuuguguuggccgucggaccagcuuauagugcacauugcaucgguauaacugaccgcgauuuuaucgaaggcgugcacgggggaaccuggguguccgccacacuggagcaagacaaaugugucacuguuauggcucccgauaagccuucucuagacauuagccucgagaccguggccaucgauagaccagcggaaguaaggaaagugugcuacaacgcaguccugacacaugugaagauuaaugacaaaugucccuccaccggcgaggcccaccuugcugaagagaacgaaggugacaaugccugcaagcggacguauucagaucgaggguggggaaacggcuguggccuguucgggaagggaaguaucguugcaugcgcuaaauuuacuugcgccaagagcaugucuuuguucgagguggaccagacaaaaauacaguacgucauucgcgcgcagcuccacgugggugccaagcaagagaauuggaacaccgauaucaaaacucugaaguuugacgcauuauccggcucacaggaaguagaguucauuggguacggaaaagcuacacuggaaugucagguucagaccgccguggauuuuggcaacagcuauaucgcugagauggaaacggagaguuggaucgucgacagacaaugggcccaggaucucacccuuccuuggcagucugguuccgggggcguguggagggagaugcaucaccuggucgaauuugagccaccgcaugcagccacaauucggguguuggcucuaggaaaucaagaaggcagccugaagacugcgcucaccggggcaaugcgcguuacaaaggacacuaacgauaauaaccuguacaaacuucacggaggucacgugucgugcagaguaaagcugucugccuugacccucaaaggcacauccuauaagauauguaccgacaaaauguuuuucgucaagaaucccacugauacggggcauggaacagugguuaugcaagugaaggucucaaaaggcgcuccuugcaggaucccagugauuguagccgacgaccugaccgcagccaucaacaaggguauauuagugacuguuaaucccauugcuaguaccaacgaugacgagguccugaucgaagugaauccuccauucggggauagcuacaucauugugggccguggagacucccggcuaacauaucaguggcacaaagagggcucuagcaucggcagcacccuggggaaggccuucuccacaacucucaaaggagcucagagacuugcagcccugggugacacggcgugggauuuuggcucuaucgggggaguguucaacucaauuggcagggcuguccaccaaguuuuugguggggccuuccggaccuuguuuggaggcaugaguuggauaacacagggcuuaaugggggcacugcuacucuggaugggagugaaugcccgcgaccgaagcaucgcucuggcauuccuugccacugguggcguacugguguuuuuggcuaccaacguccaugccugaggacuaguuauaagacugacuagcccgaugggccucccaacgggcccuccuccccuccuugcaccgagauuaauaaaaaaaaaaaaaaaaaaaaaaaaaaaaaaaaaaaaaaaaaaaaaaaaaaaaaaaaaaaaaaaaugcaucccccccccccccccccccccccccccccccaaaggcucuuuucagagccaccagaauu

SEQ ID NO: 2070 - RNA, 2266 nt, Artificial Sequence
  mRNA product Design i-3 comprising derived and/or modified sequence from YFV__NC_002031.1__SSjev(V3)-prMEdelstem_TM-JEV (polyprotein: aa122-681) (opt3)
gggagaaagcuuaccaugaacgagggcagcaucauguggcuggccucccucgcuguggucauugcaugcgccggggcgguuacucuggugcguaaaaaccgauggcuacuccugaauguaacgucagaggaucuuggcaagaccuuuaguguggggacaggaaacugcacuaccaauauucuggaagccaaauacuggugucccgacagcauggaguauaacugcccuaauuuguccccaagagaggaaccggaugacauagauuguuggugcuacggcgucgaaaacgugaggguugcuuaugguaagugugacucugcagggcggucgcgcagaucaaggcgggccaucgaucuccccacacaugagaaucacggacugaaaacccgccaagagaaguggaugacuggccgaaugggcgaaagacagcugcagaagauugagaggugguucgugcggaacccuuucuucgcggucacagcucucaccaucgccuacuuaguggggagcaauaugacgcagcguguaguuauugcacugcuuguguuggccgucggaccagcuuauagugcacauugcaucgguauaacugaccgcgauuuuaucgaaggcgugcacgggggaaccuggguguccgccacacuggagcaagacaaaugugucacuguuauggcucccgauaagccuucucuagacauuagccucgagaccguggccaucgauagaccagcggaaguaaggaaagugugcuacaacgcaguccugacacaugugaagauuaaugacaaaugucccuccaccggcgaggcccaccuugcugaagagaacgaaggugacaaugccugcaagcggacguauucagaucgaggguggggaaacggcuguggccuguucgggaagggaaguaucguugcaugcgcuaaauuuacuugcgccaagagcaugucuuuguucgagguggaccagacaaaaauacaguacgucauucgcgcgcagcuccacgugggugccaagcaagagaauuggaacaccgauaucaaaacucugaaguuugacgcauuauccggcucacaggaaguagaguucauuggguacggaaaagcuacacuggaaugucagguucagaccgccguggauuuuggcaacagcuauaucgcugagauggaaacggagaguuggaucgucgacagacaaugggcccaggaucucacccuuccuuggcagucugguuccgggggcguguggagggagaugcaucaccuggucgaauuugagccaccgcaugcagccacaauucggguguuggcucuaggaaaucaagaaggcagccugaagacugcgcucaccggggcaaugcgcguuacaaaggacacuaacgauaauaaccuguacaaacuucacggaggucacgugucgugcagaguaaagcugucugccuugacccucaaaggcacauccuauaagauauguaccgacaaaauguuuuucgucaagaaucccacugauacggggcauggaacagugguuaugcaagugaaggucucaaaaggcgcuccuugcaggaucccagugauuguagccgacgaccugaccgcagccaucaacaaggguauauuagugacuguuaaucccauugcuaguaccaacgaugacgagguccugaucgaagugaauccuccauucggggauagcuacaucauugugggccguggagacucccggcuaacauaucaguggcacaaagagggcucuagcaucggcagcacccuggggaaggccuucuccacaacucucaaaggagcucagagacuugcagcccugggugacacggcgugggauuuuggcucuaucgggggaguguucaacucaauuggcagggcuguccaccaaguuuuugguggggccuuccggaccuuguuuggaggcaugaguuggauaacacagggcuuaaugggggcacugcuacucuggaugggagugaaugcccgcgaccgaagcaucgcucuggcauuccuugccacugguggcguacugguguuuuuggcuaccaacguccaugccugaggacuaguuauaagacugacuagcccgaugggccucccaacgggcccuccuccccuccuugcaccgagauuaauaaaaaaaaaaaaaaaaaaaaaaaaaaaaaaaaaaaaaaaaaaaaaaaaaaaaaaaaaaaaaaaaugcaucccccccccccccccccccccccccccccccaaaggcucuuuucagagccaccagaauu

SEQ ID NO: 2071 - RNA, 2281 nt, Artificial Sequence
  mRNA product Design i-3 comprising derived and/or modified sequence from YFV__NC_002031.1__X-SS-prME (polyprotein: aa92-778) (opt3)
gggagaaagcuuaccaugagaggccugagcuccaggaagcggcgcucucacgacgugcucaccguccaguuccuuauccuggggauguuguuaaugacaggagguguuacucuggugcguaaaaaccgauggcuacuccugaauguaacgucagaggaucuuggcaagaccuuuaguguggggacaggaaacugcacuaccaauauucuggaagccaaauacuggugucccgacagcauggaguauaacugcccuaauuuguccccaagagaggaaccggaugacauagauuguuggugcuacggcgucgaaaacgugaggguugcuuaugguaagugugacucugcagggcggucgcgcagaucaaggcgggccaucgaucuccccacacaugagaaucacggacugaaaacccgccaagagaaguggaugacuggccgaaugggcgaaagacagcugcagaagauugagaggugguucgugcggaacccuuucuucgcggucacagcucucaccaucgccuacuuaguggggagcaauaugacgcagcguguaguuauugcacugcuuguguuggccgucggaccagcuuauagugcacauugcaucgguauaacugaccgcgauuuuaucgaaggcgugcacgggggaaccuggguguccgccacacuggagcaagacaaaugugucacuguuauggcucccgauaagccuucucuagacauuagccucgagaccguggccaucgauagaccagcggaaguaaggaaagugugcuacaacgcaguccugacacaugugaagauuaaugacaaaugucccuccaccggcgaggcccaccuugcugaagagaacgaaggugacaaugccugcaagcggacguauucagaucgaggguggggaaacggcuguggccuguucgggaagggaaguaucguugcaugcgcuaaauuuacuugcgccaagagcaugucuuuguucgagguggaccagacaaaaauacaguacgucauucgcgcgcagcuccacgugggugccaagcaagagaauuggaacaccgauaucaaaacucugaaguuugacgcauuauccggcucacaggaaguagaguucauuggguacggaaaagcuacacuggaaugucagguucagaccgccguggauuuuggcaacagcuauaucgcugagauggaaacggagaguuggaucgucgacagacaaugggcccaggaucucacccuuccuuggcagucugguuccgggggcguguggagggagaugcaucaccuggucgaauuugagccaccgcaugcagccacaauucggguguuggcucuaggaaaucaagaaggcagccugaagacugcgcucaccggggcaaugcgcguuacaaaggacacuaacgauaauaaccuguacaaacuucacggaggucacgugucgugcagaguaaagcugucugccuugacccucaaaggcacauccuauaagauauguaccgacaaaauguuuuucgucaagaaucccacugauacggggcauggaacagugguuaugcaagugaaggucucaaaaggcgcuccuugcaggaucccagugauuguagccgacgaccugaccgcagccaucaacaaggguauauuagugacuguuaaucccauugcuaguaccaacgaugacgagguccugaucgaagugaauccuccauucggggauagcuacaucauugugggccguggagacucccggcuaacauaucaguggcacaaagagggcucuagcaucgggaagcucuuuacccagacuaugaaaggagucgagcgacuggccguuaugggugauacagcaugggacuucucaagugcgggcggguuuuucacguccgugggaaagggcauucauaccguguuugguagcgcuuuccaggggcuuuuuggcggauugaacuggauaacuaagguaaucaugggcgccguccugauuuggguggggaucaauacaagaaacaugaccaugucuaugucaaugauccucguuggagugauuaugauguuccugagucuuggcgucggugcaugaggacuaguuauaagacugacuagcccgaugggccucccaacgggcccuccuccccuccuugcaccgagauuaauaaaaaaaaaaaaaaaaaaaaaaaaaaaaaaaaaaaaaaaaaaaaaaaaaaaaaaaaaaaaaaaaugcaucccccccccccccccccccccccccccccccaaaggcucuuuucagagccaccagaauu

SEQ ID NO: 2072 - RNA, 2284 nt, Artificial Sequence
  mRNA product Design i-3 comprising derived and/or modified sequence from YFV__NC_002031.1__SSjev(V3)-prME-XX (polyprotein: aa122-788) (opt3)
gggagaaagcuuaccaugaacgagggcagcaucauguggcuggccucccucgcuguggucauugcaugcgccggggcgguuacucuggugcguaaaaaccgauggcuacuccugaauguaacgucagaggaucuuggcaagaccuuuaguguggggacaggaaacugcacuaccaauauucuggaagccaaauacuggugucccgacagcauggaguauaacugcccuaauuuguccccaagagaggaaccggaugacauagauuguuggugcuacggcgucgaaaacgugaggguugcuuaugguaagugugacucugcagggcggucgcgcagaucaaggcgggccaucgaucuccccacacaugagaaucacggacugaaaacccgccaagagaaguggaugacuggccgaaugggcgaaagacagcugcagaagauugagaggugguucgugcggaacccuuucuucgcggucacagcucucaccaucgccuacuuaguggggagcaauaugacgcagcguguaguuauugcacugcuuguguuggccgucggaccagcuuauagugcacauugcaucgguauaacugaccgcgauuuuaucgaaggcgugcacgggggaaccuggguguccgccacacuggagcaagacaaaugugucacuguuauggcucccgauaagccuucucuagacauuagccucgagaccguggccaucgauagaccagcggaaguaaggaaagugugcuacaacgcaguccugacacaugugaagauuaaugacaaaugucccuccaccggcgaggcccaccuugcugaagagaacgaaggugacaaugccugcaagcggacguauucagaucgaggguggggaaacggcuguggccuguucgggaagggaaguaucguugcaugcgcuaaauuuacuugcgccaagagcaugucuuuguucgagguggaccagacaaaaauacaguacgucauucgcgcgcagcuccacgugggugccaagcaagagaauuggaacaccgauaucaaaacucugaaguuugacgcauuauccggcucacaggaaguagaguucauuggguacggaaaagcuacacuggaaugucagguucagaccgccguggauuuuggcaacagcuauaucgcugagauggaaacggagaguuggaucgucgacagacaaugggcccaggaucucacccuuccuuggcagucugguuccgggggcguguggagggagaugcaucaccuggucgaauuugagccaccgcaugcagccacaauucggguguuggcucuaggaaaucaagaaggcagccugaagacugcgcucaccggggcaaugcgcguuacaaaggacacuaacgauaauaaccuguacaaacuucacggaggucacgugucgugcagaguaaagcugucugccuugacccucaaaggcacauccuauaagauauguaccgacaaaauguuuuucgucaagaaucccacugauacggggcauggaacagugguuaugcaagugaaggucucaaaaggcgcuccuugcaggaucccagugauuguagccgacgaccugaccgcagccaucaacaaggguauauuagugacuguuaaucccauugcuaguaccaacgaugacgagguccugaucgaagugaauccuccauucggggauagcuacaucauugugggccguggagacucccggcuaacauaucaguggcacaaagagggcucuagcaucgggaagcucuuuacccagacuaugaaaggagucgagcgacuggccguuaugggugauacagcaugggacuucucaagugcgggcggguuuuucacguccgugggaaagggcauucauaccguguuugguagcgcuuuccaggggcuuuuuggcggauugaacuggauaacuaagguaaucaugggcgccguccugauuuggguggggaucaauacaagaaacaugaccaugucuaugucaaugauccucguuggagugauuaugauguuccugagucuuggcgucggugcagaucaggggugugccauaaauuuuggaaaaugaggacuaguuauaagacugacuagcccgaugggccucccaacgggcccuccuccccuccuugcaccgagauuaauaaaaaaaaaaaaaaaaaaaaaaaaaaaaaaaaaaaaaaaaaaaaaaaaaaaaaaaaaaaaaaaaugcaucccccccccccccccccccccccccccccccaaaggcucuuuucagagccaccagaauu

SEQ ID NO: 2073 - RNA, 2293 nt, Artificial Sequence
  mRNA product Design i-3 comprising derived and/or modified sequence from YFV__NC_002031.1__X-SS-prMEdelstem_TM-JEV (polyprotein: aa92-681) (opt4)
gggagaaagcuuaccaugagaggccugagcagcagaaagagaagaagccacgacgugcugaccgugcaguuccugauccugggcaugcugcugaugaccggcggcgugacccuggugagaaagaacagauggcugcugcugaacgugaccagcgaggaccugggcaagaccuucagcgugggcaccggcaacugcaccaccaacauccuggaggccaaguacuggugccccgacagcauggaguacaacugccccaaccugagccccagagaggagcccgacgacaucgacugcuggugcuacggcguggagaacgugagaguggccuacggcaagugcgacagcgccggcagaagcagaagaagcagaagagccaucgaccugcccacccacgagaaccacggccugaagaccagacaggagaaguggaugaccggcagaaugggcgagagacagcugcagaagaucgagagaugguucgugagaaaccccuucuucgccgugaccgcccugaccaucgccuaccuggugggcagcaacaugacccagagaguggugaucgcccugcuggugcuggccgugggccccgccuacagcgcccacugcaucggcaucaccgacagagacuucaucgagggcgugcacggcggcaccugggugagcgccacccuggagcaggacaagugcgugaccgugauggcccccgacaagcccagccuggacaucagccuggagaccguggccaucgacagacccgccgaggugagaaaggugugcuacaacgccgugcugacccacgugaagaucaacgacaagugccccagcaccggcgaggcccaccuggccgaggagaacgagggcgacaacgccugcaagagaaccuacagcgacagaggcuggggcaacggcugcggccuguucggcaagggcagcaucguggccugcgccaaguucaccugcgccaagagcaugagccuguucgagguggaccagaccaagauccaguacgugaucagagcccagcugcacgugggcgccaagcaggagaacuggaacaccgacaucaagacccugaaguucgacgcccugagcggcagccaggagguggaguucaucggcuacggcaaggccacccuggagugccaggugcagaccgccguggacuucggcaacagcuacaucgccgagauggagaccgagagcuggaucguggacagacagugggcccaggaccugacccugcccuggcagagcggcagcggcggcguguggagagagaugcaccaccugguggaguucgagcccccccacgccgccaccaucagagugcuggcccugggcaaccaggagggcagccugaagaccgcccugaccggcgccaugagagugaccaaggacaccaacgacaacaaccuguacaagcugcacggcggccacgugagcugcagagugaagcugagcgcccugacccugaagggcaccagcuacaagaucugcaccgacaagauguucuucgugaagaaccccaccgacaccggccacggcaccguggugaugcaggugaaggugagcaagggcgcccccugcagaauccccgugaucguggccgacgaccugaccgccgccaucaacaagggcauccuggugaccgugaaccccaucgccagcaccaacgacgacgaggugcugaucgaggugaacccccccuucggcgacagcuacaucaucgugggcagaggcgacagcagacugaccuaccaguggcacaaggagggcagcagcaucggcagcacccugggcaaggccuucagcaccacccugaagggcgcccagagacuggccgcccugggcgacaccgccugggacuucggcagcaucggcggcguguucaacagcaucggcagagccgugcaccagguguucggcggcgccuucagaacccuguucggcggcaugagcuggaucacccagggccugaugggcgcccugcugcuguggaugggcgugaacgccagagacagaagcaucgcccuggccuuccuggccaccggcggcgugcugguguuccuggccaccaacgugcacgccugaggacuaguuauaagacugacuagcccgaugggccucccaacgggcccuccuccccuccuugcaccgagauuaauaaaaaaaaaaaaaaaaaaaaaaaaaaaaaaaaaaaaaaaaaaaaaaaaaaaaaaaaaaaaaaaaugcaucccccccccccccccccccccccccccccccaaaggcucuuuucagagccaccagaauu

SEQ ID NO: 2074 - RNA, 2266 nt, Artificial Sequence
  mRNA product Design i-3 comprising derived and/or modified sequence from YFV__NC_002031.1__SSjev(V3)-prMEdelstem_TM-JEV (polyprotein: aa122-681) (opt4)
gggagaaagcuuaccaugaacgagggcagcaucauguggcuggccagccuggccguggugaucgccugcgccggcgccgugacccuggugagaaagaacagauggcugcugcugaacgugaccagcgaggaccugggcaagaccuucagcgugggcaccggcaacugcaccaccaacauccuggaggccaaguacuggugccccgacagcauggaguacaacugccccaaccugagccccagagaggagcccgacgacaucgacugcuggugcuacggcguggagaacgugagaguggccuacggcaagugcgacagcgccggcagaagcagaagaagcagaagagccaucgaccugcccacccacgagaaccacggccugaagaccagacaggagaaguggaugaccggcagaaugggcgagagacagcugcagaagaucgagagaugguucgugagaaaccccuucuucgccgugaccgcccugaccaucgccuaccuggugggcagcaacaugacccagagaguggugaucgcccugcuggugcuggccgugggccccgccuacagcgcccacugcaucggcaucaccgacagagacuucaucgagggcgugcacggcggcaccugggugagcgccacccuggagcaggacaagugcgugaccgugauggcccccgacaagcccagccuggacaucagccuggagaccguggccaucgacagacccgccgaggugagaaaggugugcuacaacgccgugcugacccacgugaagaucaacgacaagugccccagcaccggcgaggcccaccuggccgaggagaacgagggcgacaacgccugcaagagaaccuacagcgacagaggcuggggcaacggcugcggccuguucggcaagggcagcaucguggccugcgccaaguucaccugcgccaagagcaugagccuguucgagguggaccagaccaagauccaguacgugaucagagcccagcugcacgugggcgccaagcaggagaacuggaacaccgacaucaagacccugaaguucgacgcccugagcggcagccaggagguggaguucaucggcuacggcaaggccacccuggagugccaggugcagaccgccguggacuucggcaacagcuacaucgccgagauggagaccgagagcuggaucguggacagacagugggcccaggaccugacccugcccuggcagagcggcagcggcggcguguggagagagaugcaccaccugguggaguucgagcccccccacgccgccaccaucagagugcuggcccugggcaaccaggagggcagccugaagaccgcccugaccggcgccaugagagugaccaaggacaccaacgacaacaaccuguacaagcugcacggcggccacgugagcugcagagugaagcugagcgcccugacccugaagggcaccagcuacaagaucugcaccgacaagauguucuucgugaagaaccccaccgacaccggccacggcaccguggugaugcaggugaaggugagcaagggcgcccccugcagaauccccgugaucguggccgacgaccugaccgccgccaucaacaagggcauccuggugaccgugaaccccaucgccagcaccaacgacgacgaggugcugaucgaggugaacccccccuucggcgacagcuacaucaucgugggcagaggcgacagcagacugaccuaccaguggcacaaggagggcagcagcaucggcagcacccugggcaaggccuucagcaccacccugaagggcgcccagagacuggccgcccugggcgacaccgccugggacuucggcagcaucggcggcguguucaacagcaucggcagagccgugcaccagguguucggcggcgccuucagaacccuguucggcggcaugagcuggaucacccagggccugaugggcgcccugcugcuguggaugggcgugaacgccagagacagaagcaucgcccuggccuuccuggccaccggcggcgugcugguguuccuggccaccaacgugcacgccugaggacuaguuauaagacugacuagcccgaugggccucccaacgggcccuccuccccuccuugcaccgagauuaauaaaaaaaaaaaaaaaaaaaaaaaaaaaaaaaaaaaaaaaaaaaaaaaaaaaaaaaaaaaaaaaaugcaucccccccccccccccccccccccccccccccaaaggcucuuuucagagccaccagaauu

SEQ ID NO: 2075 - RNA, 2281 nt, Artificial Sequence
  mRNA product Design i-3 comprising derived and/or modified sequence from YFV__NC_002031.1__X-SS-prME (polyprotein: aa92-778) (opt4)
gggagaaagcuuaccaugagaggccugagcagcagaaagagaagaagccacgacgugcugaccgugcaguuccugauccugggcaugcugcugaugaccggcggcgugacccuggugagaaagaacagauggcugcugcugaacgugaccagcgaggaccugggcaagaccuucagcgugggcaccggcaacugcaccaccaacauccuggaggccaaguacuggugccccgacagcauggaguacaacugccccaaccugagccccagagaggagcccgacgacaucgacugcuggugcuacggcguggagaacgugagaguggccuacggcaagugcgacagcgccggcagaagcagaagaagcagaagagccaucgaccugcccacccacgagaaccacggccugaagaccagacaggagaaguggaugaccggcagaaugggcgagagacagcugcagaagaucgagagaugguucgugagaaaccccuucuucgccgugaccgcccugaccaucgccuaccuggugggcagcaacaugacccagagaguggugaucgcccugcuggugcuggccgugggccccgccuacagcgcccacugcaucggcaucaccgacagagacuucaucgagggcgugcacggcggcaccugggugagcgccacccuggagcaggacaagugcgugaccgugauggcccccgacaagcccagccuggacaucagccuggagaccguggccaucgacagacccgccgaggugagaaaggugugcuacaacgccgugcugacccacgugaagaucaacgacaagugccccagcaccggcgaggcccaccuggccgaggagaacgagggcgacaacgccugcaagagaaccuacagcgacagaggcuggggcaacggcugcggccuguucggcaagggcagcaucguggccugcgccaaguucaccugcgccaagagcaugagccuguucgagguggaccagaccaagauccaguacgugaucagagcccagcugcacgugggcgccaagcaggagaacuggaacaccgacaucaagacccugaaguucgacgcccugagcggcagccaggagguggaguucaucggcuacggcaaggccacccuggagugccaggugcagaccgccguggacuucggcaacagcuacaucgccgagauggagaccgagagcuggaucguggacagacagugggcccaggaccugacccugcccuggcagagcggcagcggcggcguguggagagagaugcaccaccugguggaguucgagcccccccacgccgccaccaucagagugcuggcccugggcaaccaggagggcagccugaagaccgcccugaccggcgccaugagagugaccaaggacaccaacgacaacaaccuguacaagcugcacggcggccacgugagcugcagagugaagcugagcgcccugacccugaagggcaccagcuacaagaucugcaccgacaagauguucuucgugaagaaccccaccgacaccggccacggcaccguggugaugcaggugaaggugagcaagggcgcccccugcagaauccccgugaucguggccgacgaccugaccgccgccaucaacaagggcauccuggugaccgugaaccccaucgccagcaccaacgacgacgaggugcugaucgaggugaacccccccuucggcgacagcuacaucaucgugggcagaggcgacagcagacugaccuaccaguggcacaaggagggcagcagcaucggcaagcuguucacccagaccaugaagggcguggagagacuggccgugaugggcgacaccgccugggacuucagcagcgccggcggcuucuucaccagcgugggcaagggcauccacaccguguucggcagcgccuuccagggccuguucggcggccugaacuggaucaccaaggugaucaugggcgccgugcugaucugggugggcaucaacaccagaaacaugaccaugagcaugagcaugauccuggugggcgugaucaugauguuccugagccugggcgugggcgccugaggacuaguuauaagacugacuagcccgaugggccucccaacgggcccuccuccccuccuugcaccgagauuaauaaaaaaaaaaaaaaaaaaaaaaaaaaaaaaaaaaaaaaaaaaaaaaaaaaaaaaaaaaaaaaaaugcaucccccccccccccccccccccccccccccccaaaggcucuuuucagagccaccagaauu

SEQ ID NO: 2076 - RNA, 2284 nt, Artificial Sequence
  mRNA product Design i-3 comprising derived and/or modified sequence from YFV__NC_002031.1__SSjev(V3)-prME-XX (polyprotein: aa122-788) (opt4)
gggagaaagcuuaccaugaacgagggcagcaucauguggcuggccagccuggccguggugaucgccugcgccggcgccgugacccuggugagaaagaacagauggcugcugcugaacgugaccagcgaggaccugggcaagaccuucagcgugggcaccggcaacugcaccaccaacauccuggaggccaaguacuggugccccgacagcauggaguacaacugccccaaccugagccccagagaggagcccgacgacaucgacugcuggugcuacggcguggagaacgugagaguggccuacggcaagugcgacagcgccggcagaagcagaagaagcagaagagccaucgaccugcccacccacgagaaccacggccugaagaccagacaggagaaguggaugaccggcagaaugggcgagagacagcugcagaagaucgagagaugguucgugagaaaccccuucuucgccgugaccgcccugaccaucgccuaccuggugggcagcaacaugacccagagaguggugaucgcccugcuggugcuggccgugggccccgccuacagcgcccacugcaucggcaucaccgacagagacuucaucgagggcgugcacggcggcaccugggugagcgccacccuggagcaggacaagugcgugaccgugauggcccccgacaagcccagccuggacaucagccuggagaccguggccaucgacagacccgccgaggugagaaaggugugcuacaacgccgugcugacccacgugaagaucaacgacaagugccccagcaccggcgaggcccaccuggccgaggagaacgagggcgacaacgccugcaagagaaccuacagcgacagaggcuggggcaacggcugcggccuguucggcaagggcagcaucguggccugcgccaaguucaccugcgccaagagcaugagccuguucgagguggaccagaccaagauccaguacgugaucagagcccagcugcacgugggcgccaagcaggagaacuggaacaccgacaucaagacccugaaguucgacgcccugagcggcagccaggagguggaguucaucggcuacggcaaggccacccuggagugccaggugcagaccgccguggacuucggcaacagcuacaucgccgagauggagaccgagagcuggaucguggacagacagugggcccaggaccugacccugcccuggcagagcggcagcggcggcguguggagagagaugcaccaccugguggaguucgagcccccccacgccgccaccaucagagugcuggcccugggcaaccaggagggcagccugaagaccgcccugaccggcgccaugagagugaccaaggacaccaacgacaacaaccuguacaagcugcacggcggccacgugagcugcagagugaagcugagcgcccugacccugaagggcaccagcuacaagaucugcaccgacaagauguucuucgugaagaaccccaccgacaccggccacggcaccguggugaugcaggugaaggugagcaagggcgcccccugcagaauccccgugaucguggccgacgaccugaccgccgccaucaacaagggcauccuggugaccgugaaccccaucgccagcaccaacgacgacgaggugcugaucgaggugaacccccccuucggcgacagcuacaucaucgugggcagaggcgacagcagacugaccuaccaguggcacaaggagggcagcagcaucggcaagcuguucacccagaccaugaagggcguggagagacuggccgugaugggcgacaccgccugggacuucagcagcgccggcggcuucuucaccagcgugggcaagggcauccacaccguguucggcagcgccuuccagggccuguucggcggccugaacuggaucaccaaggugaucaugggcgccgugcugaucugggugggcaucaacaccagaaacaugaccaugagcaugagcaugauccuggugggcgugaucaugauguuccugagccugggcgugggcgccgaccagggcugcgccaucaacuucggcaagugaggacuaguuauaagacugacuagcccgaugggccucccaacgggcccuccuccccuccuugcaccgagauuaauaaaaaaaaaaaaaaaaaaaaaaaaaaaaaaaaaaaaaaaaaaaaaaaaaaaaaaaaaaaaaaaaugcaucccccccccccccccccccccccccccccccaaaggcucuuuucagagccaccagaauu

SEQ ID NO: 2077 - RNA, 2293 nt, Artificial Sequence
  mRNA product Design i-3 comprising derived and/or modified sequence from YFV__NC_002031.1__X-SS-prMEdelstem_TM-JEV (polyprotein: aa92-681) (opt5)
gggagaaagcuuaccaugagaggccugagcucccggaagcgcagaucucacgacgugcucaccguccaguuccugauccuugggaugcugcucaugacaggaggcguuacgcuggugcggaaaaaccgcuggcuucugcucaaugugaccagcgaggaucuggggaagacauuuuccgucggaaccggcaacugcacaaccaauauucuggaagccaaauacuggugucccgacucuauggaguauaacugcccuaaucucagcccgagagaagaacccgaugacaucgauuguuggugcuacgggguggaaaacguucggguggcuuauggaaagugugacuccgccggccgcucuagacggagccgcagagcgauugaucugccuacacaugagaaucacggccuuaaaacccggcaagagaaguggaugacggggcgcaugggagaaagacagcugcagaagaucgagcggugguucguccgcaaccccuuuuucgcugugaccgcccucacaauugccuaccugguuggcuccaauaugacccagagaguggucaucgcccuucuggugcucgcuguggggccugcuuauagcgcccauugcaucggaauuacagaccgggauuuuaucgaaggcguccacgggggaaccuggguuucugcgacgcuggagcaagacaaaugugugacagugauggcccccgauaagccuucccuggacauuagccucgagaccgucgcuaucgauagaccggccgaagugcgcaaaguuugcuacaacgcugugcugacacaugucaagauuaaugacaaaugucccucuaccggcgaggcccaccuugcggaagagaacgaaggcgacaaugccugcaagcggaccuauuccgauagaggguggggaaacggcugugggcuguucggaaagggcagcaucguggcuugcgccaaauuuacaugcgcuaagucuaugucccucuucgagguugaccagacgaaaauucaguacgugauccgcgcccagcugcacgucggggccaagcaagagaauuggaacaccgauaucaaaacacuuaaguuugacgcucugagcggaucccaggaaguggaguucauuggcuacggcaaagcgacccucgaaugucagguccagacagccguggauuuugggaacucuuauaucgcugagauggaaaccgagagcuggauuguugaccggcaaugggcccaggaucugacgcugccuuggcaguccggaagcggcgggguguggagagagaugcaucaccucgucgaguucgagcccccucaugccgcuacaauccgcgugcuggcccuuggaaaucaagaaggcucucugaagaccgcgcucaccggggcuaugcggguuacaaaggacaccaacgauaauaaccuguacaaacuucacggcggacacguguccugcagagucaagcugagcgcccucacacugaaaggcacgucuuauaagauuuguaccgacaaaauguuuuucgugaagaaucccacagauaccgggcauggaacagugguuaugcaggucaaggugagcaaaggcgccccgugccgcaucccugugaucgucgcugacgaccugaccgccgcuauuaacaaggggauccucgugacgguuaaucccauugccuccaccaacgaugacgaggugcugaucgaagucaauccucccuucggagauucuuacauuaucgugggccggggagacagcagacuuacauaucaguggcacaaagagggcuccagcaucggcagcacccuggggaaggccuucuccacaacgcucaaaggagcucagagacuggccgcgcuuggcgacaccgcuugggauuuugggucuaucggaggcguguucaacagcauugggcgggccguccaccaaguuuuuggaggcgccuuccgcacacuguuuggcgggauguccuggaucacccagggacucaugggcgcucugcuucuguggaugggggugaaugccagagaccggucuauugcucucgccuuccuggcgacaggaggcgugcuggucuuucucgccaccaacgugcaugcuugaggacuaguuauaagacugacuagcccgaugggccucccaacgggcccuccuccccuccuugcaccgagauuaauaaaaaaaaaaaaaaaaaaaaaaaaaaaaaaaaaaaaaaaaaaaaaaaaaaaaaaaaaaaaaaaaugcaucccccccccccccccccccccccccccccccaaaggcucuuuucagagccaccagaauu

SEQ ID NO: 2078 - RNA, 2266 nt, Artificial Sequence
  mRNA product Design i-3 comprising derived and/or modified sequence from YFV__NC_002031.1__SSjev(V3)-prMEdelstem_TM-JEV (polyprotein: aa122-681) (opt5)
gggagaaagcuuaccaugaacgagggcagcaucauguggcuggccucccucgcuguggucauugccugcgcgggggcuguuacgcuggugcggaaaaaccgcuggcuucugcucaaugugaccagcgaggaucuggggaagacauuuuccgucggaaccggcaacugcacaaccaauauucuggaagccaaauacuggugucccgacucuauggaguauaacugcccuaaucucagcccgagagaagaacccgaugacaucgauuguuggugcuacgggguggaaaacguucggguggcuuauggaaagugugacuccgccggccgcucuagacggagccgcagagcgauugaucugccuacacaugagaaucacggccuuaaaacccggcaagagaaguggaugacggggcgcaugggagaaagacagcugcagaagaucgagcggugguucguccgcaaccccuuuuucgcugugaccgcccucacaauugccuaccugguuggcuccaauaugacccagagaguggucaucgcccuucuggugcucgcuguggggccugcuuauagcgcccauugcaucggaauuacagaccgggauuuuaucgaaggcguccacgggggaaccuggguuucugcgacgcuggagcaagacaaaugugugacagugauggcccccgauaagccuucccuggacauuagccucgagaccgucgcuaucgauagaccggccgaagugcgcaaaguuugcuacaacgcugugcugacacaugucaagauuaaugacaaaugucccucuaccggcgaggcccaccuugcggaagagaacgaaggcgacaaugccugcaagcggaccuauuccgauagaggguggggaaacggcugugggcuguucggaaagggcagcaucguggcuugcgccaaauuuacaugcgcuaagucuaugucccucuucgagguugaccagacgaaaauucaguacgugauccgcgcccagcugcacgucggggccaagcaagagaauuggaacaccgauaucaaaacacuuaaguuugacgcucugagcggaucccaggaaguggaguucauuggcuacggcaaagcgacccucgaaugucagguccagacagccguggauuuugggaacucuuauaucgcugagauggaaaccgagagcuggauuguugaccggcaaugggcccaggaucugacgcugccuuggcaguccggaagcggcgggguguggagagagaugcaucaccucgucgaguucgagcccccucaugccgcuacaauccgcgugcuggcccuuggaaaucaagaaggcucucugaagaccgcgcucaccggggcuaugcggguuacaaaggacaccaacgauaauaaccuguacaaacuucacggcggacacguguccugcagagucaagcugagcgcccucacacugaaaggcacgucuuauaagauuuguaccgacaaaauguuuuucgugaagaaucccacagauaccgggcauggaacagugguuaugcaggucaaggugagcaaaggcgccccgugccgcaucccugugaucgucgcugacgaccugaccgccgcuauuaacaaggggauccucgugacgguuaaucccauugccuccaccaacgaugacgaggugcugaucgaagucaauccucccuucggagauucuuacauuaucgugggccggggagacagcagacuuacauaucaguggcacaaagagggcuccagcaucggcagcacccuggggaaggccuucuccacaacgcucaaaggagcucagagacuggccgcgcuuggcgacaccgcuugggauuuugggucuaucggaggcguguucaacagcauugggcgggccguccaccaaguuuuuggaggcgccuuccgcacacuguuuggcgggauguccuggaucacccagggacucaugggcgcucugcuucuguggaugggggugaaugccagagaccggucuauugcucucgccuuccuggcgacaggaggcgugcuggucuuucucgccaccaacgugcaugcuugaggacuaguuauaagacugacuagcccgaugggccucccaacgggcccuccuccccuccuugcaccgagauuaauaaaaaaaaaaaaaaaaaaaaaaaaaaaaaaaaaaaaaaaaaaaaaaaaaaaaaaaaaaaaaaaaugcaucccccccccccccccccccccccccccccccaaaggcucuuuucagagccaccagaauu

SEQ ID NO: 2079 - RNA, 2281 nt, Artificial Sequence
  mRNA product Design i-3 comprising derived and/or modified sequence from YFV__NC_002031.1__X-SS-prME (polyprotein: aa92-778) (opt5)
gggagaaagcuuaccaugagaggccugagcucccggaagcgcagaucucacgacgugcucaccguccaguuccugauccuugggaugcugcucaugacaggaggcguuacgcuggugcggaaaaaccgcuggcuucugcucaaugugaccagcgaggaucuggggaagacauuuuccgucggaaccggcaacugcacaaccaauauucuggaagccaaauacuggugucccgacucuauggaguauaacugcccuaaucucagcccgagagaagaacccgaugacaucgauuguuggugcuacgggguggaaaacguucggguggcuuauggaaagugugacuccgccggccgcucuagacggagccgcagagcgauugaucugccuacacaugagaaucacggccuuaaaacccggcaagagaaguggaugacggggcgcaugggagaaagacagcugcagaagaucgagcggugguucguccgcaaccccuuuuucgcugugaccgcccucacaauugccuaccugguuggcuccaauaugacccagagaguggucaucgcccuucuggugcucgcuguggggccugcuuauagcgcccauugcaucggaauuacagaccgggauuuuaucgaaggcguccacgggggaaccuggguuucugcgacgcuggagcaagacaaaugugugacagugauggcccccgauaagccuucccuggacauuagccucgagaccgucgcuaucgauagaccggccgaagugcgcaaaguuugcuacaacgcugugcugacacaugucaagauuaaugacaaaugucccucuaccggcgaggcccaccuugcggaagagaacgaaggcgacaaugccugcaagcggaccuauuccgauagaggguggggaaacggcugugggcuguucggaaagggcagcaucguggcuugcgccaaauuuacaugcgcuaagucuaugucccucuucgagguugaccagacgaaaauucaguacgugauccgcgcccagcugcacgucggggccaagcaagagaauuggaacaccgauaucaaaacacuuaaguuugacgcucugagcggaucccaggaaguggaguucauuggcuacggcaaagcgacccucgaaugucagguccagacagccguggauuuugggaacucuuauaucgcugagauggaaaccgagagcuggauuguugaccggcaaugggcccaggaucugacgcugccuuggcaguccggaagcggcgggguguggagagagaugcaucaccucgucgaguucgagcccccucaugccgcuacaauccgcgugcuggcccuuggaaaucaagaaggcucucugaagaccgcgcucaccggggcuaugcggguuacaaaggacaccaacgauaauaaccuguacaaacuucacggcggacacguguccugcagagucaagcugagcgcccucacacugaaaggcacgucuuauaagauuuguaccgacaaaauguuuuucgugaagaaucccacagauaccgggcauggaacagugguuaugcaggucaaggugagcaaaggcgccccgugccgcaucccugugaucgucgcugacgaccugaccgccgcuauuaacaaggggauccucgugacgguuaaucccauugccuccaccaacgaugacgaggugcugaucgaagucaauccucccuucggagauucuuacauuaucgugggccggggagacagcagacuuacauaucaguggcacaaagagggcuccagcaucggaaagcuguuuacccagacaaugaaaggcguugagcgccucgcggugaugggggauaccgccugggacuucucuuccgcuggaggcuuuuucacgagcgucgggaaggggauucauacaguguuuggcucugccuuccaagggcuguuuggcggacugaacuggaucaccaagguuauuaugggcgcugugcuuaucugggucgggauuaauacacggaacaugaccauguccaugagcaugauccucgugggagugauuaugauguuccugucccugggcgucggggccugaggacuaguuauaagacugacuagcccgaugggccucccaacgggcccuccuccccuccuugcaccgagauuaauaaaaaaaaaaaaaaaaaaaaaaaaaaaaaaaaaaaaaaaaaaaaaaaaaaaaaaaaaaaaaaaaugcaucccccccccccccccccccccccccccccccaaaggcucuuuucagagccaccagaauu

SEQ ID NO: 2080 - RNA, 2284 nt, Artificial Sequence
  mRNA product Design i-3 comprising derived and/or modified sequence from YFV__NC_002031.1__SSjev(V3)-prME-XX (polyprotein: aa122-788) (opt5)
gggagaaagcuuaccaugaacgagggcagcaucauguggcuggccucccucgcuguggucauugccugcgcgggggcuguuacgcuggugcggaaaaaccgcuggcuucugcucaaugugaccagcgaggaucuggggaagacauuuuccgucggaaccggcaacugcacaaccaauauucuggaagccaaauacuggugucccgacucuauggaguauaacugcccuaaucucagcccgagagaagaacccgaugacaucgauuguuggugcuacgggguggaaaacguucggguggcuuauggaaagugugacuccgccggccgcucuagacggagccgcagagcgauugaucugccuacacaugagaaucacggccuuaaaacccggcaagagaaguggaugacggggcgcaugggagaaagacagcugcagaagaucgagcggugguucguccgcaaccccuuuuucgcugugaccgcccucacaauugccuaccugguuggcuccaauaugacccagagaguggucaucgcccuucuggugcucgcuguggggccugcuuauagcgcccauugcaucggaauuacagaccgggauuuuaucgaaggcguccacgggggaaccuggguuucugcgacgcuggagcaagacaaaugugugacagugauggcccccgauaagccuucccuggacauuagccucgagaccgucgcuaucgauagaccggccgaagugcgcaaaguuugcuacaacgcugugcugacacaugucaagauuaaugacaaaugucccucuaccggcgaggcccaccuugcggaagagaacgaaggcgacaaugccugcaagcggaccuauuccgauagaggguggggaaacggcugugggcuguucggaaagggcagcaucguggcuugcgccaaauuuacaugcgcuaagucuaugucccucuucgagguugaccagacgaaaauucaguacgugauccgcgcccagcugcacgucggggccaagcaagagaauuggaacaccgauaucaaaacacuuaaguuugacgcucugagcggaucccaggaaguggaguucauuggcuacggcaaagcgacccucgaaugucagguccagacagccguggauuuugggaacucuuauaucgcugagauggaaaccgagagcuggauuguugaccggcaaugggcccaggaucugacgcugccuuggcaguccggaagcggcgggguguggagagagaugcaucaccucgucgaguucgagcccccucaugccgcuacaauccgcgugcuggcccuuggaaaucaagaaggcucucugaagaccgcgcucaccggggcuaugcggguuacaaaggacaccaacgauaauaaccuguacaaacuucacggcggacacguguccugcagagucaagcugagcgcccucacacugaaaggcacgucuuauaagauuuguaccgacaaaauguuuuucgugaagaaucccacagauaccgggcauggaacagugguuaugcaggucaaggugagcaaaggcgccccgugccgcaucccugugaucgucgcugacgaccugaccgccgcuauuaacaaggggauccucgugacgguuaaucccauugccuccaccaacgaugacgaggugcugaucgaagucaauccucccuucggagauucuuacauuaucgugggccggggagacagcagacuuacauaucaguggcacaaagagggcuccagcaucggaaagcuguuuacccagacaaugaaaggcguugagcgccucgcggugaugggggauaccgccugggacuucucuuccgcuggaggcuuuuucacgagcgucgggaaggggauucauacaguguuuggcucugccuuccaagggcuguuuggcggacugaacuggaucaccaagguuauuaugggcgcugugcuuaucugggucgggauuaauacacggaacaugaccauguccaugagcaugauccucgugggagugauuaugauguuccugucccugggcgucggggccgaucagggaugugcgaucaauuuuggcaaaugaggacuaguuauaagacugacuagcccgaugggccucccaacgggcccuccuccccuccuugcaccgagauuaauaaaaaaaaaaaaaaaaaaaaaaaaaaaaaaaaaaaaaaaaaaaaaaaaaaaaaaaaaaaaaaaaugcaucccccccccccccccccccccccccccccccaaaggcucuuuucagagccaccagaauu

SEQ ID NO: 2081 - RNA, 2293 nt, Artificial Sequence
  mRNA product Design i-3 comprising derived and/or modified sequence from YFV__NC_002031.1__X-SS-prMEdelstem_TM-JEV (polyprotein: aa92-681) (opt6)
gggagaaagcuuaccaugagaggauuaucaaguagaaaaagaagaucacaugauguacuaaccgugcaauuuuugaucuuagggaugcucuuaaugacaggagguguuacauuaguaagaaagaaucgauggcugcuuuuaaaugugacaucagaggauuuagggaaaacauuuucgguaggaacaggaaauuguacuacaaauauacuugaagcaaaauauuggugcccagacucuauggaauauaauuguccaaauuuaaguccuagagaagaaccugacgauauagauuguugguguuaugguguagaaaauguaagaguagcauacggcaaaugcgauagugcaggacguucuagacguucaaggagagccauagaucugcccacucacgaaaaucacggauugaaaacacgacaagaaaaauggaugacugggcgaaugggagaaagacaacuacagaaaauugaaagaugguucguuagaaauccauucuuugccguaacagcuuuaacaauagccuauuuaguagguaguaauaugacacaaagaguaguaauagcauugcuaguguuagcaguuggaccagcuuauagugcacauugcauaggaauaacagauagagacuuuauagaaggaguacacgggggaacuuggguaagugccacuuuagaacaagauaaauguguuacagugauggcgccagauaaaccaagucuggacauaaguuuggaaacaguagcgauugauagacccgcagaaguaagaaaaguuuguuauaaugcuguucuaacccauguuaaaauaaaugauaaaugcccuagcaccggagaagcccaucuagcagaagaaaaugaaggagauaacgcauguaaacgaacauacucagauagaggauggggcaacggauguggcuuguuuggaaaagguagcauaguagcaugcgcuaaauuuacaugcgcaaagucaaugucauuauuugaaguagaucaaacaaaaauacaauauguaauaagagcucaauuacacgugggugcaaaacaagaaaauuggaauacagacauaaagacacuaaaguucgacgcauuaaguggaucacaagagguagaauuuauaggguacggaaaagcgacuuuagagugucaaguccaaacagcaguagauuucgguaacucauacauagcagaaauggaaacugaaaguuggauaguagauagacaaugggcacaagacuugacacuaccuuggcaaucaggaagcggaggaguauggagagaaaugcaucauuuaguagaauuugaaccaccucaugcagcaacaauaagaguauuagcccuaggaaaccaagaaggaaguuuaaaaacagcacuaacaggagcuaugagaguaacaaaagauacaaaugacaacaaucuauacaaauuacacggaggacauguaagcugccggguaaaguugagcgcacuaacauuaaaaggaacgaguuauaaaauaugcacagauaaaauguucuuuguuaaaaauccuacagauaccggucauggaacaguaguaaugcaaguaaaaguaaguaaaggcgcucccuguagaauaccuguaauagucgcagacgauuuaaccgcagcaauaaauaaaggaauauuagucacgguaaacccaauagcgucaacaaaugaugaugaaguauuaauagaaguuaacccaccuuuuggagacaguuauauaauagucggaaggggugauaguagacuaacauaccaauggcauaaagaaggaagcucaauaggaaguacacuaggaaaagcauuuaguacaacauuaaaaggagcacaaagauuagcagcauuaggagauacagcaugggauuuuggaagcauaggaggaguauuuaauaguauagguagagcaguacaucaaguauuuggaggagcauuuagaacauuauuuggaggaaugaguuggauaacacaaggauuaaugggagcauuauuauuauggaugggaguaaaugcaagagauagaaguauagcauuagcauuuuuagcaacaggaggaguauuaguauuuuuagcaacaaauguacaugcaugaggacuaguuauaagacugacuagcccgaugggccucccaacgggcccuccuccccuccuugcaccgagauuaauaaaaaaaaaaaaaaaaaaaaaaaaaaaaaaaaaaaaaaaaaaaaaaaaaaaaaaaaaaaaaaaaugcaucccccccccccccccccccccccccccccccaaaggcucuuuucagagccaccagaauu

SEQ ID NO: 2082 - RNA, 2266 nt, Artificial Sequence
  mRNA product Design i-3 comprising derived and/or modified sequence from YFV__NC_002031.1__SSjev(V3)-prMEdelstem_TM-JEV (polyprotein: aa122-681) (opt6)
gggagaaagcuuaccaugaaugaagguucaauuaugugguuggcaucauuagcaguuguaauugcaugugcuggugcaguuacauuaguaagaaagaaucgauggcugcuuuuaaaugugacaucagaggauuuagggaaaacauuuucgguaggaacaggaaauuguacuacaaauauacuugaagcaaaauauuggugcccagacucuauggaauauaauuguccaaauuuaaguccuagagaagaaccugacgauauagauuguugguguuaugguguagaaaauguaagaguagcauacggcaaaugcgauagugcaggacguucuagacguucaaggagagccauagaucugcccacucacgaaaaucacggauugaaaacacgacaagaaaaauggaugacugggcgaaugggagaaagacaacuacagaaaauugaaagaugguucguuagaaauccauucuuugccguaacagcuuuaacaauagccuauuuaguagguaguaauaugacacaaagaguaguaauagcauugcuaguguuagcaguuggaccagcuuauagugcacauugcauaggaauaacagauagagacuuuauagaaggaguacacgggggaacuuggguaagugccacuuuagaacaagauaaauguguuacagugauggcgccagauaaaccaagucuggacauaaguuuggaaacaguagcgauugauagacccgcagaaguaagaaaaguuuguuauaaugcuguucuaacccauguuaaaauaaaugauaaaugcccuagcaccggagaagcccaucuagcagaagaaaaugaaggagauaacgcauguaaacgaacauacucagauagaggauggggcaacggauguggcuuguuuggaaaagguagcauaguagcaugcgcuaaauuuacaugcgcaaagucaaugucauuauuugaaguagaucaaacaaaaauacaauauguaauaagagcucaauuacacgugggugcaaaacaagaaaauuggaauacagacauaaagacacuaaaguucgacgcauuaaguggaucacaagagguagaauuuauaggguacggaaaagcgacuuuagagugucaaguccaaacagcaguagauuucgguaacucauacauagcagaaauggaaacugaaaguuggauaguagauagacaaugggcacaagacuugacacuaccuuggcaaucaggaagcggaggaguauggagagaaaugcaucauuuaguagaauuugaaccaccucaugcagcaacaauaagaguauuagcccuaggaaaccaagaaggaaguuuaaaaacagcacuaacaggagcuaugagaguaacaaaagauacaaaugacaacaaucuauacaaauuacacggaggacauguaagcugccggguaaaguugagcgcacuaacauuaaaaggaacgaguuauaaaauaugcacagauaaaauguucuuuguuaaaaauccuacagauaccggucauggaacaguaguaaugcaaguaaaaguaaguaaaggcgcucccuguagaauaccuguaauagucgcagacgauuuaaccgcagcaauaaauaaaggaauauuagucacgguaaacccaauagcgucaacaaaugaugaugaaguauuaauagaaguuaacccaccuuuuggagacaguuauauaauagucggaaggggugauaguagacuaacauaccaauggcauaaagaaggaagcucaauaggaaguacacuaggaaaagcauuuaguacaacauuaaaaggagcacaaagauuagcagcauuaggagauacagcaugggauuuuggaagcauaggaggaguauuuaauaguauagguagagcaguacaucaaguauuuggaggagcauuuagaacauuauuuggaggaaugaguuggauaacacaaggauuaaugggagcauuauuauuauggaugggaguaaaugcaagagauagaaguauagcauuagcauuuuuagcaacaggaggaguauuaguauuuuuagcaacaaauguacaugcaugaggacuaguuauaagacugacuagcccgaugggccucccaacgggcccuccuccccuccuugcaccgagauuaauaaaaaaaaaaaaaaaaaaaaaaaaaaaaaaaaaaaaaaaaaaaaaaaaaaaaaaaaaaaaaaaaugcaucccccccccccccccccccccccccccccccaaaggcucuuuucagagccaccagaauu

SEQ ID NO: 2083 - RNA, 2281 nt, Artificial Sequence
  mRNA product Design i-3 comprising derived and/or modified sequence from YFV__NC_002031.1__X-SS-prME (polyprotein: aa92-778) (opt6)
gggagaaagcuuaccaugagaggauuaucaaguagaaaaagaagaucacaugauguacuaaccgugcaauuuuugaucuuagggaugcucuuaaugacaggagguguuacauuaguaagaaagaaucgauggcugcuuuuaaaugugacaucagaggauuuagggaaaacauuuucgguaggaacaggaaauuguacuacaaauauacuugaagcaaaauauuggugcccagacucuauggaauauaauuguccaaauuuaaguccuagagaagaaccugacgauauagauuguugguguuaugguguagaaaauguaagaguagcauacggcaaaugcgauagugcaggacguucuagacguucaaggagagccauagaucugcccacucacgaaaaucacggauugaaaacacgacaagaaaaauggaugacugggcgaaugggagaaagacaacuacagaaaauugaaagaugguucguuagaaauccauucuuugccguaacagcuuuaacaauagccuauuuaguagguaguaauaugacacaaagaguaguaauagcauugcuaguguuagcaguuggaccagcuuauagugcacauugcauaggaauaacagauagagacuuuauagaaggaguacacgggggaacuuggguaagugccacuuuagaacaagauaaauguguuacagugauggcgccagauaaaccaagucuggacauaaguuuggaaacaguagcgauugauagacccgcagaaguaagaaaaguuuguuauaaugcuguucuaacccauguuaaaauaaaugauaaaugcccuagcaccggagaagcccaucuagcagaagaaaaugaaggagauaacgcauguaaacgaacauacucagauagaggauggggcaacggauguggcuuguuuggaaaagguagcauaguagcaugcgcuaaauuuacaugcgcaaagucaaugucauuauuugaaguagaucaaacaaaaauacaauauguaauaagagcucaauuacacgugggugcaaaacaagaaaauuggaauacagacauaaagacacuaaaguucgacgcauuaaguggaucacaagagguagaauuuauaggguacggaaaagcgacuuuagagugucaaguccaaacagcaguagauuucgguaacucauacauagcagaaauggaaacugaaaguuggauaguagauagacaaugggcacaagacuugacacuaccuuggcaaucaggaagcggaggaguauggagagaaaugcaucauuuaguagaauuugaaccaccucaugcagcaacaauaagaguauuagcccuaggaaaccaagaaggaaguuuaaaaacagcacuaacaggagcuaugagaguaacaaaagauacaaaugacaacaaucuauacaaauuacacggaggacauguaagcugccggguaaaguugagcgcacuaacauuaaaaggaacgaguuauaaaauaugcacagauaaaauguucuuuguuaaaaauccuacagauaccggucauggaacaguaguaaugcaaguaaaaguaaguaaaggcgcucccuguagaauaccuguaauagucgcagacgauuuaaccgcagcaauaaauaaaggaauauuagucacgguaaacccaauagcgucaacaaaugaugaugaaguauuaauagaaguuaacccaccuuuuggagacaguuauauaauagucggaaggggugauaguagacuaacauaccaauggcauaaagaaggaagcucaauaggaaaauuauuuacucaaaccaugaaagguguagaaaggcuagcuguuaugggugacacagcaugggauuuuucaagcgcaggaggguucuuuacaucaguagguaaaggaauacauacaguauuuggaagugcauuucaaggauuauuuggugguuuaaauuggauaacaaaaguaauaaugggcgcaguuuuaauauggguagguauaaacacaagaaauaugacaaugucuaugaguaugauauuggucggaguaauaaugauguuuuuaucacuaggagugggugcaugaggacuaguuauaagacugacuagcccgaugggccucccaacgggcccuccuccccuccuugcaccgagauuaauaaaaaaaaaaaaaaaaaaaaaaaaaaaaaaaaaaaaaaaaaaaaaaaaaaaaaaaaaaaaaaaaugcaucccccccccccccccccccccccccccccccaaaggcucuuuucagagccaccagaauu

SEQ ID NO: 2084 - RNA, 2284 nt, Artificial Sequence
  mRNA product Design i-3 comprising derived and/or modified sequence from YFV__NC_002031.1__SSjev(V3)-prME-XX (polyprotein: aa122-788) (opt6)
gggagaaagcuuaccaugaaugaagguucaauuaugugguuggcaucauuagcaguuguaauugcaugugcuggugcaguuacauuaguaagaaagaaucgauggcugcuuuuaaaugugacaucagaggauuuagggaaaacauuuucgguaggaacaggaaauuguacuacaaauauacuugaagcaaaauauuggugcccagacucuauggaauauaauuguccaaauuuaaguccuagagaagaaccugacgauauagauuguugguguuaugguguagaaaauguaagaguagcauacggcaaaugcgauagugcaggacguucuagacguucaaggagagccauagaucugcccacucacgaaaaucacggauugaaaacacgacaagaaaaauggaugacugggcgaaugggagaaagacaacuacagaaaauugaaagaugguucguuagaaauccauucuuugccguaacagcuuuaacaauagccuauuuaguagguaguaauaugacacaaagaguaguaauagcauugcuaguguuagcaguuggaccagcuuauagugcacauugcauaggaauaacagauagagacuuuauagaaggaguacacgggggaacuuggguaagugccacuuuagaacaagauaaauguguuacagugauggcgccagauaaaccaagucuggacauaaguuuggaaacaguagcgauugauagacccgcagaaguaagaaaaguuuguuauaaugcuguucuaacccauguuaaaauaaaugauaaaugcccuagcaccggagaagcccaucuagcagaagaaaaugaaggagauaacgcauguaaacgaacauacucagauagaggauggggcaacggauguggcuuguuuggaaaagguagcauaguagcaugcgcuaaauuuacaugcgcaaagucaaugucauuauuugaaguagaucaaacaaaaauacaauauguaauaagagcucaauuacacgugggugcaaaacaagaaaauuggaauacagacauaaagacacuaaaguucgacgcauuaaguggaucacaagagguagaauuuauaggguacggaaaagcgacuuuagagugucaaguccaaacagcaguagauuucgguaacucauacauagcagaaauggaaacugaaaguuggauaguagauagacaaugggcacaagacuugacacuaccuuggcaaucaggaagcggaggaguauggagagaaaugcaucauuuaguagaauuugaaccaccucaugcagcaacaauaagaguauuagcccuaggaaaccaagaaggaaguuuaaaaacagcacuaacaggagcuaugagaguaacaaaagauacaaaugacaacaaucuauacaaauuacacggaggacauguaagcugccggguaaaguugagcgcacuaacauuaaaaggaacgaguuauaaaauaugcacagauaaaauguucuuuguuaaaaauccuacagauaccggucauggaacaguaguaaugcaaguaaaaguaaguaaaggcgcucccuguagaauaccuguaauagucgcagacgauuuaaccgcagcaauaaauaaaggaauauuagucacgguaaacccaauagcgucaacaaaugaugaugaaguauuaauagaaguuaacccaccuuuuggagacaguuauauaauagucggaaggggugauaguagacuaacauaccaauggcauaaagaaggaagcucaauaggaaaauuauuuacucaaaccaugaaagguguagaaaggcuagcuguuaugggugacacagcaugggauuuuucaagcgcaggaggguucuuuacaucaguagguaaaggaauacauacaguauuuggaagugcauuucaaggauuauuuggugguuuaaauuggauaacaaaaguaauaaugggcgcaguuuuaauauggguagguauaaacacaagaaauaugacaaugucuaugaguaugauauuggucggaguaauaaugauguuuuuaucacuaggagugggugcagaucaagguugcgcuauuaauuuuggaaaaugaggacuaguuauaagacugacuagcccgaugggccucccaacgggcccuccuccccuccuugcaccgagauuaauaaaaaaaaaaaaaaaaaaaaaaaaaaaaaaaaaaaaaaaaaaaaaaaaaaaaaaaaaaaaaaaaugcaucccccccccccccccccccccccccccccccaaaggcucuuuucagagccaccagaauu

SEQ ID NO: 2085 - RNA, 2293 nt, Artificial Sequence
  mRNA product Design i-3 comprising derived and/or modified sequence from YFV__NC_002031.1__X-SS-prMEdelstem_TM-JEV (polyprotein: aa92-681) (opt11)
gggagaaagcuuaccaugcggggacuaagcagcagaaaaagacgcagccacgaugugcucaccgugcaauuccucauacuggggaugcuccuaaugaccggaggcgugacccuaguaaggaaaaacagauggcuacuacuaaacguaaccucagaagaucuaggaaagacauuuucagucggcacaggcaacugcacaaccaacauacuagaagcaaaauauuggugcccagacagcauggaauacaacugucccaaccucagcccaagagaggaaccagacgacauagacugcugguguuacggaguagaaaacguaagaguggcauacggcaaaugcgacagcgcaggcaggagccgaagaucccgcagagccaucgacuugcccacgcacgaaaaccacggccucaaaacacgacaagaaaaauggaugacagggcgaaugggagaacgacagcuccagaaaauagaacgaugguucguccggaacccguucuucgcaguaacggcacuaacaaucgcauaccucguaggcagcaacaugacacaaagaguggucaucgcgcuacucguacuagcaguggggcccgcauacagugcacacugcauaggaaucacagaccgugacuucaucgaaggcguacacggaggaacguggguaagcgcgacacuggaacaagacaaaugcgugacaguaauggcaccagacaaaccaagccuagacauaucccuagaaacggucgccaucgaccgucccgcagaaguacgaaagguaugcuauaaugcaguccucacacacgucaaaauaaacgacaaaugccccagcacgggcgaagcacaccucgccgaagaaaacgaaggggauaacgcgugcaaacgcaccuacuccgacaggggauggggcaacggaugcggacuguucggaaaaggauccauagucgcaugcgcaaaauuuaccugcgcaaaaagcaugagcuuguucgagguagaccaaacgaagauccaauacguaauccgagcucaacuacacguuggggccaagcaagagaacuggaauacggacaucaaaacacuaaaauucgacgcacucuccggcucacaagaagucgaguucaucggcuacggcaaagcaacacuagaaugccaaguacaaacagcgguggacuucggcaacagcuacauagcagaaauggaaacagaaagcuggauaguagaccgacaaugggcacaagaccuaacucugccauggcaaagcggcucaggaggaguguggagagagaugcaccaccugguagaguucgaacccccacacgcagcaacaauaaggguacuggcacuaggcaaccaagaaggcagccuaaaaaccgcacucacaggagccaugcgcgugacgaaggacaccaacgacaacaaccucuacaaacuccacggagggcacguauccugccgcguaaaacuaucagcacuaacgcuaaaaggaacaagcuacaaaauaugcacagacaaaauguucuucgucaaaaaccccacagacacaggccacggcacagucguaaugcaagugaaggucagcaagggggcccccugccgaaucccagucauaguggcagacgaccucacggccgccaucaacaaagggauccugguaacagugaacccaauagcaucgaccaacgacgacgaaguccucauagaagugaaucccccguucggcgacagcuacaucaucguaggacgcggcgacucccgacugacguaccaauggcauaaagaaggcagcagcauugggagcacgcucgggaaagcguucucgaccacgcucaagggcgcgcaaaggcucgcggccuugggcgauaccgcgugggauuucgggagcauaggcggggucuuuaacucgaucgggcgcgcgguccaucaaguguucgggggcgcguucaggaccuuguucgggggcaugagcuggaucacgcaagggcucaugggcgcgcucuugcucuggaugggggucaaugccagggacaggagcauagccuuggccuuucucgcgaccgggggcgugcucguguucuuggccacgaacgugcacgcgugaggacuaguuauaagacugacuagcccgaugggccucccaacgggcccuccuccccuccuugcaccgagauuaauaaaaaaaaaaaaaaaaaaaaaaaaaaaaaaaaaaaaaaaaaaaaaaaaaaaaaaaaaaaaaaaaugcaucccccccccccccccccccccccccccccccaaaggcucuuuucagagccaccagaauu

SEQ ID NO: 2086 - RNA, 2266 nt, Artificial Sequence
  mRNA product Design i-3 comprising derived and/or modified sequence from YFV__NC_002031.1__SSjev(V3)-prMEdelstem_TM-JEV (polyprotein: aa122-681) (opt11)
gggagaaagcuuaccaugaacgagggcucgaucaugugguuggccucgcucgcggucgugaucgcgugcgcgggcgcggugacccuaguaaggaaaaacagauggcuacuacuaaacguaaccucagaagaucuaggaaagacauuuucagucggcacaggcaacugcacaaccaacauacuagaagcaaaauauuggugcccagacagcauggaauacaacugucccaaccucagcccaagagaggaaccagacgacauagacugcugguguuacggaguagaaaacguaagaguggcauacggcaaaugcgacagcgcaggcaggagccgaagaucccgcagagccaucgacuugcccacgcacgaaaaccacggccucaaaacacgacaagaaaaauggaugacagggcgaaugggagaacgacagcuccagaaaauagaacgaugguucguccggaacccguucuucgcaguaacggcacuaacaaucgcauaccucguaggcagcaacaugacacaaagaguggucaucgcgcuacucguacuagcaguggggcccgcauacagugcacacugcauaggaaucacagaccgugacuucaucgaaggcguacacggaggaacguggguaagcgcgacacuggaacaagacaaaugcgugacaguaauggcaccagacaaaccaagccuagacauaucccuagaaacggucgccaucgaccgucccgcagaaguacgaaagguaugcuauaaugcaguccucacacacgucaaaauaaacgacaaaugccccagcacgggcgaagcacaccucgccgaagaaaacgaaggggauaacgcgugcaaacgcaccuacuccgacaggggauggggcaacggaugcggacuguucggaaaaggauccauagucgcaugcgcaaaauuuaccugcgcaaaaagcaugagcuuguucgagguagaccaaacgaagauccaauacguaauccgagcucaacuacacguuggggccaagcaagagaacuggaauacggacaucaaaacacuaaaauucgacgcacucuccggcucacaagaagucgaguucaucggcuacggcaaagcaacacuagaaugccaaguacaaacagcgguggacuucggcaacagcuacauagcagaaauggaaacagaaagcuggauaguagaccgacaaugggcacaagaccuaacucugccauggcaaagcggcucaggaggaguguggagagagaugcaccaccugguagaguucgaacccccacacgcagcaacaauaaggguacuggcacuaggcaaccaagaaggcagccuaaaaaccgcacucacaggagccaugcgcgugacgaaggacaccaacgacaacaaccucuacaaacuccacggagggcacguauccugccgcguaaaacuaucagcacuaacgcuaaaaggaacaagcuacaaaauaugcacagacaaaauguucuucgucaaaaaccccacagacacaggccacggcacagucguaaugcaagugaaggucagcaagggggcccccugccgaaucccagucauaguggcagacgaccucacggccgccaucaacaaagggauccugguaacagugaacccaauagcaucgaccaacgacgacgaaguccucauagaagugaaucccccguucggcgacagcuacaucaucguaggacgcggcgacucccgacugacguaccaauggcauaaagaaggcagcagcauugggagcacgcucgggaaagcguucucgaccacgcucaagggcgcgcaaaggcucgcggccuugggcgauaccgcgugggauuucgggagcauaggcggggucuuuaacucgaucgggcgcgcgguccaucaaguguucgggggcgcguucaggaccuuguucgggggcaugagcuggaucacgcaagggcucaugggcgcgcucuugcucuggaugggggucaaugccagggacaggagcauagccuuggccuuucucgcgaccgggggcgugcucguguucuuggccacgaacgugcacgcgugaggacuaguuauaagacugacuagcccgaugggccucccaacgggcccuccuccccuccuugcaccgagauuaauaaaaaaaaaaaaaaaaaaaaaaaaaaaaaaaaaaaaaaaaaaaaaaaaaaaaaaaaaaaaaaaaugcaucccccccccccccccccccccccccccccccaaaggcucuuuucagagccaccagaauu

SEQ ID NO: 2087 - RNA, 2281 nt, Artificial Sequence
  mRNA product Design i-3 comprising derived and/or modified sequence from YFV__NC_002031.1__X-SS-prME (polyprotein: aa92-778) (opt11)
gggagaaagcuuaccaugcggggacuaagcagcagaaaaagacgcagccacgaugugcucaccgugcaauuccucauacuggggaugcuccuaaugaccggaggcgugacccuaguaaggaaaaacagauggcuacuacuaaacguaaccucagaagaucuaggaaagacauuuucagucggcacaggcaacugcacaaccaacauacuagaagcaaaauauuggugcccagacagcauggaauacaacugucccaaccucagcccaagagaggaaccagacgacauagacugcugguguuacggaguagaaaacguaagaguggcauacggcaaaugcgacagcgcaggcaggagccgaagaucccgcagagccaucgacuugcccacgcacgaaaaccacggccucaaaacacgacaagaaaaauggaugacagggcgaaugggagaacgacagcuccagaaaauagaacgaugguucguccggaacccguucuucgcaguaacggcacuaacaaucgcauaccucguaggcagcaacaugacacaaagaguggucaucgcgcuacucguacuagcaguggggcccgcauacagugcacacugcauaggaaucacagaccgugacuucaucgaaggcguacacggaggaacguggguaagcgcgacacuggaacaagacaaaugcgugacaguaauggcaccagacaaaccaagccuagacauaucccuagaaacggucgccaucgaccgucccgcagaaguacgaaagguaugcuauaaugcaguccucacacacgucaaaauaaacgacaaaugccccagcacgggcgaagcacaccucgccgaagaaaacgaaggggauaacgcgugcaaacgcaccuacuccgacaggggauggggcaacggaugcggacuguucggaaaaggauccauagucgcaugcgcaaaauuuaccugcgcaaaaagcaugagcuuguucgagguagaccaaacgaagauccaauacguaauccgagcucaacuacacguuggggccaagcaagagaacuggaauacggacaucaaaacacuaaaauucgacgcacucuccggcucacaagaagucgaguucaucggcuacggcaaagcaacacuagaaugccaaguacaaacagcgguggacuucggcaacagcuacauagcagaaauggaaacagaaagcuggauaguagaccgacaaugggcacaagaccuaacucugccauggcaaagcggcucaggaggaguguggagagagaugcaccaccugguagaguucgaacccccacacgcagcaacaauaaggguacuggcacuaggcaaccaagaaggcagccuaaaaaccgcacucacaggagccaugcgcgugacgaaggacaccaacgacaacaaccucuacaaacuccacggagggcacguauccugccgcguaaaacuaucagcacuaacgcuaaaaggaacaagcuacaaaauaugcacagacaaaauguucuucgucaaaaaccccacagacacaggccacggcacagucguaaugcaagugaaggucagcaagggggcccccugccgaaucccagucauaguggcagacgaccucacggccgccaucaacaaagggauccugguaacagugaacccaauagcaucgaccaacgacgacgaaguccucauagaagugaaucccccguucggcgacagcuacaucaucguaggacgcggcgacucccgacugacguaccaauggcauaaagaaggcagcagcauuggaaaacuauucacccaaaccaugaagggcgucgaaagacucgcggugaugggagacaccgcaugggacuucucgagcgcaggcggcuucuucacaagcguaggaaaagggauucacacaguauucggauccgcauuccaaggccucuucgggggacuaaacuggauaacgaaaguaauaaugggagcaguucucauauggguaggaaucaacacacgaaacaugacaauguccaugucaaugauacucguaggcguaaucaugauguuucugucacucggagugggagcaugaggacuaguuauaagacugacuagcccgaugggccucccaacgggcccuccuccccuccuugcaccgagauuaauaaaaaaaaaaaaaaaaaaaaaaaaaaaaaaaaaaaaaaaaaaaaaaaaaaaaaaaaaaaaaaaaugcaucccccccccccccccccccccccccccccccaaaggcucuuuucagagccaccagaauu

SEQ ID NO: 2088 - RNA, 2284 nt, Artificial Sequence
  mRNA product Design i-3 comprising derived and/or modified sequence from YFV__NC_002031.1__SSjev(V3)-prME-XX (polyprotein: aa122-788) (opt11)
gggagaaagcuuaccaugaacgagggcucgaucaugugguuggccucgcucgcggucgugaucgcgugcgcgggcgcggugacccuaguaaggaaaaacagauggcuacuacuaaacguaaccucagaagaucuaggaaagacauuuucagucggcacaggcaacugcacaaccaacauacuagaagcaaaauauuggugcccagacagcauggaauacaacugucccaaccucagcccaagagaggaaccagacgacauagacugcugguguuacggaguagaaaacguaagaguggcauacggcaaaugcgacagcgcaggcaggagccgaagaucccgcagagccaucgacuugcccacgcacgaaaaccacggccucaaaacacgacaagaaaaauggaugacagggcgaaugggagaacgacagcuccagaaaauagaacgaugguucguccggaacccguucuucgcaguaacggcacuaacaaucgcauaccucguaggcagcaacaugacacaaagaguggucaucgcgcuacucguacuagcaguggggcccgcauacagugcacacugcauaggaaucacagaccgugacuucaucgaaggcguacacggaggaacguggguaagcgcgacacuggaacaagacaaaugcgugacaguaauggcaccagacaaaccaagccuagacauaucccuagaaacggucgccaucgaccgucccgcagaaguacgaaagguaugcuauaaugcaguccucacacacgucaaaauaaacgacaaaugccccagcacgggcgaagcacaccucgccgaagaaaacgaaggggauaacgcgugcaaacgcaccuacuccgacaggggauggggcaacggaugcggacuguucggaaaaggauccauagucgcaugcgcaaaauuuaccugcgcaaaaagcaugagcuuguucgagguagaccaaacgaagauccaauacguaauccgagcucaacuacacguuggggccaagcaagagaacuggaauacggacaucaaaacacuaaaauucgacgcacucuccggcucacaagaagucgaguucaucggcuacggcaaagcaacacuagaaugccaaguacaaacagcgguggacuucggcaacagcuacauagcagaaauggaaacagaaagcuggauaguagaccgacaaugggcacaagaccuaacucugccauggcaaagcggcucaggaggaguguggagagagaugcaccaccugguagaguucgaacccccacacgcagcaacaauaaggguacuggcacuaggcaaccaagaaggcagccuaaaaaccgcacucacaggagccaugcgcgugacgaaggacaccaacgacaacaaccucuacaaacuccacggagggcacguauccugccgcguaaaacuaucagcacuaacgcuaaaaggaacaagcuacaaaauaugcacagacaaaauguucuucgucaaaaaccccacagacacaggccacggcacagucguaaugcaagugaaggucagcaagggggcccccugccgaaucccagucauaguggcagacgaccucacggccgccaucaacaaagggauccugguaacagugaacccaauagcaucgaccaacgacgacgaaguccucauagaagugaaucccccguucggcgacagcuacaucaucguaggacgcggcgacucccgacugacguaccaauggcauaaagaaggcagcagcauuggaaaacuauucacccaaaccaugaagggcgucgaaagacucgcggugaugggagacaccgcaugggacuucucgagcgcaggcggcuucuucacaagcguaggaaaagggauucacacaguauucggauccgcauuccaaggccucuucgggggacuaaacuggauaacgaaaguaauaaugggagcaguucucauauggguaggaaucaacacacgaaacaugacaauguccaugucaaugauacucguaggcguaaucaugauguuucugucacucggagugggagcagaccaagguugcgccauaaacuucggcaagugaggacuaguuauaagacugacuagcccgaugggccucccaacgggcccuccuccccuccuugcaccgagauuaauaaaaaaaaaaaaaaaaaaaaaaaaaaaaaaaaaaaaaaaaaaaaaaaaaaaaaaaaaaaaaaaaugcaucccccccccccccccccccccccccccccccaaaggcucuuuucagagccaccagaauu

SEQ ID NO: 2089 - RNA, 2398 nt, Artificial Sequence
  mRNA product Design a-4 comprising derived and/or modified sequence from YFV__NC_002031.1__X-SS-prMEdelstem_TM-JEV (polyprotein: aa92-681) (wt)
gggagacuccugucgggcggaaguaggaggaguagaguuuaaaaacaguacucuuuuuccgguucgggacguaguugaagcaacgacaagccggauaaccgcucuugagacaggaagcuuaccaugagaggauuguccucaaggaaacgccguucccaugauguucugacugugcaauuccuaauuuugggaaugcuguugaugacggguggagugaccuuggugcggaaaaacagaugguugcuccuaaaugugacaucugaggaccucgggaaaacauucucugugggcacaggcaacugcacaacaaacauuuuggaagccaaguacuggugcccagacucaauggaauacaacugucccaaucucaguccaagagaggagccagaugacauugauugcuggugcuaugggguggaaaacguuagagucgcauaugguaagugugacucagcaggcaggucuaggaggucaagaagggccauugacuugccuacgcaugaaaaccaugguuugaagacccggcaagaaaaauggaugacuggaagaaugggugaaaggcaacuccaaaagauugagagaugguucgugaggaaccccuuuuuugcagugacggcucugaccauugccuaccuugugggaagcaacaugacgcaacgagucgugauugcccuacuggucuuggcuguugguccggccuacucagcucacugcauuggaauuacugacagggauuucauugagggggugcauggaggaacuuggguuucagcuacccuggagcaagacaagugugucacuguuauggccccugacaagccuucauuggacaucucacuagagacaguagccauugauagaccugcugaggugaggaaaguguguuacaaugcaguucucacucaugugaagauuaaugacaagugccccagcacuggagaggcccaccuagcugaagagaacgaaggggacaaugcgugcaagcgcacuuauucugauagaggcuggggcaauggcuguggccuauuugggaaagggagcauuguggcaugcgccaaauucacuugugccaaauccaugaguuuguuugagguugaucagaccaaaauucaguaugucaucagagcacaauugcauguaggggccaagcaggaaaauuggaauaccgacauuaagacucucaaguuugaugcccugucaggcucccaggaagucgaguucauuggguauggaaaagcuacacuggaaugccaggugcaaacugcgguggacuuugguaacaguuacaucgcugagauggaaacagagagcuggauaguggacagacagugggcccaggacuugacccugccauggcagaguggaaguggcgggguguggagagagaugcaucaucuugucgaauuugaaccuccgcaugccgccacuaucagaguacuggcccugggaaaccaggaaggcuccuugaaaacagcucuuacuggcgcaaugaggguuacaaaggacacaaaugacaacaaccuuuacaaacuacaugguggacauguuucuugcagagugaaauugucagcuuugacacucaaggggacauccuacaaaauaugcacugacaaaauguuuuuugucaagaacccaacugacacuggccauggcacuguugugaugcaggugaaagugucaaaaggagcccccugcaggauuccagugauaguagcugaugaucuuacagcggcaaucaauaaaggcauuuugguuacaguuaaccccaucgccucaaccaaugaugaugaagugcugauugaggugaacccaccuuuuggagacagcuacauuaucguugggagaggagauucacgucucacuuaccaguggcacaaagagggaagcucaauaggcagcacgcugggcaaggccuuuucaacaacuuugaagggagcucaaagacuggcagcguugggcgacacagccugggacuuuggcucuauuggaggggucuucaacuccauaggaagagccguucaccaaguguuugguggugccuucagaacacucuuugggggaaugucuuggaucacacaagggcuaaugggugcccuacugcucuggaugggcgucaacgcacgagaccgaucaauugcuuuggccuucuuagccacaggaggugugcucguguucuuagcgaccaaugugcacgccuaaggacuagucccuguucccagagcccacuuuuuuuucuuuuuuugaaauaaaauagccugucuuucagaucuaaaaaaaaaaaaaaaaaaaaaaaaaaaaaaaaaaaaaaaaaaaaaaaaaaaaaaaaaaaaaaaaugcaucccccccccccccccccccccccccccccccaaaggcucuuuucagagccaccagaauu

SEQ ID NO: 2090 - RNA, 2371 nt, Artificial Sequence
  mRNA product Design a-4 comprising derived and/or modified sequence from YFV__NC_002031.1__SSjev(V3)-prMEdelstem_TM-JEV (polyprotein: aa122-681) (wt)
gggagacuccugucgggcggaaguaggaggaguagaguuuaaaaacaguacucuuuuuccgguucgggacguaguugaagcaacgacaagccggauaaccgcucuugagacaggaagcuuaccaugaaugaaggcucaaucauguggcucgcgagcuuggcaguugucauagcuugugcaggagccgugaccuuggugcggaaaaacagaugguugcuccuaaaugugacaucugaggaccucgggaaaacauucucugugggcacaggcaacugcacaacaaacauuuuggaagccaaguacuggugcccagacucaauggaauacaacugucccaaucucaguccaagagaggagccagaugacauugauugcuggugcuaugggguggaaaacguuagagucgcauaugguaagugugacucagcaggcaggucuaggaggucaagaagggccauugacuugccuacgcaugaaaaccaugguuugaagacccggcaagaaaaauggaugacuggaagaaugggugaaaggcaacuccaaaagauugagagaugguucgugaggaaccccuuuuuugcagugacggcucugaccauugccuaccuugugggaagcaacaugacgcaacgagucgugauugcccuacuggucuuggcuguugguccggccuacucagcucacugcauuggaauuacugacagggauuucauugagggggugcauggaggaacuuggguuucagcuacccuggagcaagacaagugugucacuguuauggccccugacaagccuucauuggacaucucacuagagacaguagccauugauagaccugcugaggugaggaaaguguguuacaaugcaguucucacucaugugaagauuaaugacaagugccccagcacuggagaggcccaccuagcugaagagaacgaaggggacaaugcgugcaagcgcacuuauucugauagaggcuggggcaauggcuguggccuauuugggaaagggagcauuguggcaugcgccaaauucacuugugccaaauccaugaguuuguuugagguugaucagaccaaaauucaguaugucaucagagcacaauugcauguaggggccaagcaggaaaauuggaauaccgacauuaagacucucaaguuugaugcccugucaggcucccaggaagucgaguucauuggguauggaaaagcuacacuggaaugccaggugcaaacugcgguggacuuugguaacaguuacaucgcugagauggaaacagagagcuggauaguggacagacagugggcccaggacuugacccugccauggcagaguggaaguggcgggguguggagagagaugcaucaucuugucgaauuugaaccuccgcaugccgccacuaucagaguacuggcccugggaaaccaggaaggcuccuugaaaacagcucuuacuggcgcaaugaggguuacaaaggacacaaaugacaacaaccuuuacaaacuacaugguggacauguuucuugcagagugaaauugucagcuuugacacucaaggggacauccuacaaaauaugcacugacaaaauguuuuuugucaagaacccaacugacacuggccauggcacuguugugaugcaggugaaagugucaaaaggagcccccugcaggauuccagugauaguagcugaugaucuuacagcggcaaucaauaaaggcauuuugguuacaguuaaccccaucgccucaaccaaugaugaugaagugcugauugaggugaacccaccuuuuggagacagcuacauuaucguugggagaggagauucacgucucacuuaccaguggcacaaagagggaagcucaauaggcagcacgcugggcaaggccuuuucaacaacuuugaagggagcucaaagacuggcagcguugggcgacacagccugggacuuuggcucuauuggaggggucuucaacuccauaggaagagccguucaccaaguguuugguggugccuucagaacacucuuugggggaaugucuuggaucacacaagggcuaaugggugcccuacugcucuggaugggcgucaacgcacgagaccgaucaauugcuuuggccuucuuagccacaggaggugugcucguguucuuagcgaccaaugugcacgccuaaggacuagucccuguucccagagcccacuuuuuuuucuuuuuuugaaauaaaauagccugucuuucagaucuaaaaaaaaaaaaaaaaaaaaaaaaaaaaaaaaaaaaaaaaaaaaaaaaaaaaaaaaaaaaaaaaugcaucccccccccccccccccccccccccccccccaaaggcucuuuucagagccaccagaauu

SEQ ID NO: 2091 - RNA, 2386 nt, Artificial Sequence
  mRNA product Design a-4 comprising derived and/or modified sequence from YFV__NC_002031.1__X-SS-prME (polyprotein: aa92-778) (wt)
gggagacuccugucgggcggaaguaggaggaguagaguuuaaaaacaguacucuuuuuccgguucgggacguaguugaagcaacgacaagccggauaaccgcucuugagacaggaagcuuaccaugagaggauuguccucaaggaaacgccguucccaugauguucugacugugcaauuccuaauuuugggaaugcuguugaugacggguggagugaccuuggugcggaaaaacagaugguugcuccuaaaugugacaucugaggaccucgggaaaacauucucugugggcacaggcaacugcacaacaaacauuuuggaagccaaguacuggugcccagacucaauggaauacaacugucccaaucucaguccaagagaggagccagaugacauugauugcuggugcuaugggguggaaaacguuagagucgcauaugguaagugugacucagcaggcaggucuaggaggucaagaagggccauugacuugccuacgcaugaaaaccaugguuugaagacccggcaagaaaaauggaugacuggaagaaugggugaaaggcaacuccaaaagauugagagaugguucgugaggaaccccuuuuuugcagugacggcucugaccauugccuaccuugugggaagcaacaugacgcaacgagucgugauugcccuacuggucuuggcuguugguccggccuacucagcucacugcauuggaauuacugacagggauuucauugagggggugcauggaggaacuuggguuucagcuacccuggagcaagacaagugugucacuguuauggccccugacaagccuucauuggacaucucacuagagacaguagccauugauagaccugcugaggugaggaaaguguguuacaaugcaguucucacucaugugaagauuaaugacaagugccccagcacuggagaggcccaccuagcugaagagaacgaaggggacaaugcgugcaagcgcacuuauucugauagaggcuggggcaauggcuguggccuauuugggaaagggagcauuguggcaugcgccaaauucacuugugccaaauccaugaguuuguuugagguugaucagaccaaaauucaguaugucaucagagcacaauugcauguaggggccaagcaggaaaauuggaauaccgacauuaagacucucaaguuugaugcccugucaggcucccaggaagucgaguucauuggguauggaaaagcuacacuggaaugccaggugcaaacugcgguggacuuugguaacaguuacaucgcugagauggaaacagagagcuggauaguggacagacagugggcccaggacuugacccugccauggcagaguggaaguggcgggguguggagagagaugcaucaucuugucgaauuugaaccuccgcaugccgccacuaucagaguacuggcccugggaaaccaggaaggcuccuugaaaacagcucuuacuggcgcaaugaggguuacaaaggacacaaaugacaacaaccuuuacaaacuacaugguggacauguuucuugcagagugaaauugucagcuuugacacucaaggggacauccuacaaaauaugcacugacaaaauguuuuuugucaagaacccaacugacacuggccauggcacuguugugaugcaggugaaagugucaaaaggagcccccugcaggauuccagugauaguagcugaugaucuuacagcggcaaucaauaaaggcauuuugguuacaguuaaccccaucgccucaaccaaugaugaugaagugcugauugaggugaacccaccuuuuggagacagcuacauuaucguugggagaggagauucacgucucacuuaccaguggcacaaagagggaagcucaauaggaaaguuguucacucagaccaugaaaggcguggaacgccuggccgucaugggagacaccgccugggauuucagcuccgcuggaggguucuucacuucgguugggaaaggaauccauacgguguuuggcucugccuuucaggggcuauuuggcggcuugaacuggauaacaaaggucaucaugggggcgguacuuauauggguuggcaucaacacaagaaacaugacaauguccaugagcaugaucuugguaggagugaucaugauguuuuugucucuaggaguuggggcguaaggacuagucccuguucccagagcccacuuuuuuuucuuuuuuugaaauaaaauagccugucuuucagaucuaaaaaaaaaaaaaaaaaaaaaaaaaaaaaaaaaaaaaaaaaaaaaaaaaaaaaaaaaaaaaaaaugcaucccccccccccccccccccccccccccccccaaaggcucuuuucagagccaccagaauu

SEQ ID NO: 2092 - RNA, 2389 nt, Artificial Sequence
  mRNA product Design a-4 comprising derived and/or modified sequence from YFV__NC_002031.1__SSjev(V3)-prME-XX (polyprotein: aa122-788) (wt)
gggagacuccugucgggcggaaguaggaggaguagaguuuaaaaacaguacucuuuuuccgguucgggacguaguugaagcaacgacaagccggauaaccgcucuugagacaggaagcuuaccaugaaugaaggcucaaucauguggcucgcgagcuuggcaguugucauagcuugugcaggagccgugaccuuggugcggaaaaacagaugguugcuccuaaaugugacaucugaggaccucgggaaaacauucucugugggcacaggcaacugcacaacaaacauuuuggaagccaaguacuggugcccagacucaauggaauacaacugucccaaucucaguccaagagaggagccagaugacauugauugcuggugcuaugggguggaaaacguuagagucgcauaugguaagugugacucagcaggcaggucuaggaggucaagaagggccauugacuugccuacgcaugaaaaccaugguuugaagacccggcaagaaaaauggaugacuggaagaaugggugaaaggcaacuccaaaagauugagagaugguucgugaggaaccccuuuuuugcagugacggcucugaccauugccuaccuugugggaagcaacaugacgcaacgagucgugauugcccuacuggucuuggcuguugguccggccuacucagcucacugcauuggaauuacugacagggauuucauugagggggugcauggaggaacuuggguuucagcuacccuggagcaagacaagugugucacuguuauggccccugacaagccuucauuggacaucucacuagagacaguagccauugauagaccugcugaggugaggaaaguguguuacaaugcaguucucacucaugugaagauuaaugacaagugccccagcacuggagaggcccaccuagcugaagagaacgaaggggacaaugcgugcaagcgcacuuauucugauagaggcuggggcaauggcuguggccuauuugggaaagggagcauuguggcaugcgccaaauucacuugugccaaauccaugaguuuguuugagguugaucagaccaaaauucaguaugucaucagagcacaauugcauguaggggccaagcaggaaaauuggaauaccgacauuaagacucucaaguuugaugcccugucaggcucccaggaagucgaguucauuggguauggaaaagcuacacuggaaugccaggugcaaacugcgguggacuuugguaacaguuacaucgcugagauggaaacagagagcuggauaguggacagacagugggcccaggacuugacccugccauggcagaguggaaguggcgggguguggagagagaugcaucaucuugucgaauuugaaccuccgcaugccgccacuaucagaguacuggcccugggaaaccaggaaggcuccuugaaaacagcucuuacuggcgcaaugaggguuacaaaggacacaaaugacaacaaccuuuacaaacuacaugguggacauguuucuugcagagugaaauugucagcuuugacacucaaggggacauccuacaaaauaugcacugacaaaauguuuuuugucaagaacccaacugacacuggccauggcacuguugugaugcaggugaaagugucaaaaggagcccccugcaggauuccagugauaguagcugaugaucuuacagcggcaaucaauaaaggcauuuugguuacaguuaaccccaucgccucaaccaaugaugaugaagugcugauugaggugaacccaccuuuuggagacagcuacauuaucguugggagaggagauucacgucucacuuaccaguggcacaaagagggaagcucaauaggaaaguuguucacucagaccaugaaaggcguggaacgccuggccgucaugggagacaccgccugggauuucagcuccgcuggaggguucuucacuucgguugggaaaggaauccauacgguguuuggcucugccuuucaggggcuauuuggcggcuugaacuggauaacaaaggucaucaugggggcgguacuuauauggguuggcaucaacacaagaaacaugacaauguccaugagcaugaucuugguaggagugaucaugauguuuuugucucuaggaguuggggcggaucaaggaugcgccaucaacuuuggcaaguaaggacuagucccuguucccagagcccacuuuuuuuucuuuuuuugaaauaaaauagccugucuuucagaucuaaaaaaaaaaaaaaaaaaaaaaaaaaaaaaaaaaaaaaaaaaaaaaaaaaaaaaaaaaaaaaaaugcaucccccccccccccccccccccccccccccccaaaggcucuuuucagagccaccagaauu

SEQ ID NO: 2093 - RNA, 2398 nt, Artificial Sequence
  mRNA product Design a-4 comprising derived and/or modified sequence from YFV__NC_002031.1__X-SS-prMEdelstem_TM-JEV (polyprotein: aa92-681) (opt1)
gggagacuccugucgggcggaaguaggaggaguagaguuuaaaaacaguacucuuuuuccgguucgggacguaguugaagcaacgacaagccggauaaccgcucuugagacaggaagcuuaccaugcggggccugagcucccgcaagcggcgcagccacgacgugcucaccguccaguuccugauccuggggaugcuccugaugaccggcggggugacgcuggugcggaagaaccgcuggcuccugcugaacgucaccuccgaggaccucggcaagaccuucagcguggggaccggcaacugcacgaccaacauccuggaggccaaguacuggugccccgacuccauggaguacaacugcccgaaccugagcccccgggaggagcccgacgacaucgacugcuggugcuacggcguggagaacguccgcguggccuacgggaagugcgacuccgcgggccggagccgccggucccgccgggccaucgaccuccccacccacgagaaccacgggcugaagacccgccaggagaaguggaugacgggccggaugggggagcgccagcugcagaagaucgagcggugguucgugcgcaacccguucuucgccgucaccgcccucaccaucgccuaccuggugggcagcaacaugacccagcggguggucaucgcgcugcucgugcuggccgugggccccgccuacuccgcccacugcaucgggaucacggaccgcgacuucaucgagggcguccacgggggcaccugggugagcgcgacccuggagcaggacaagugcgugaccgucauggcccccgacaagcccucccucgacaucagccuggagacgguggccaucgaccggccggccgaggugcgcaaggucugcuacaacgccgugcugacccacgugaagaucaacgacaagugccccuccaccggcgaggcgcaccucgccgaggagaacgagggggacaacgccugcaagcggaccuacagcgaccggggcugggggaacggcugcgggcuguucggcaagggcuccaucgucgccugcgccaaguucacgugcgcgaagagcaugucccuguucgagguggaccagaccaagauccaguacgucauccgcgcccagcuccacgugggggccaagcaggagaacuggaacaccgacaucaagacccugaaguucgacgcccugagcggcagccaggagguggaguucaucggguacggcaaggccacgcucgagugccagguccagaccgcgguggacuucgggaacuccuacaucgccgagauggagaccgagagcuggaucguggaccggcagugggcccaggaccugacccugcccuggcaguccggcagcggcggggucuggcgcgagaugcaccaccucguggaguucgagcccccgcacgccgccacgauccgggugcuggcgcugggcaaccaggaggggucccucaagaccgcccugaccggcgccaugcgcgucaccaaggacacgaacgacaacaaccuguacaagcuccacgggggccacgugagcugccgggugaagcuguccgcccugacccucaagggcaccagcuacaagaucugcaccgacaagauguucuucgucaagaaccccacggacaccgggcacggcaccguggugaugcaggucaagguguccaagggggcgcccugccgcaucccggugaucgucgccgacgaccugaccgccgccaucaacaagggcauccuggugaccgugaacccgaucgccagcacgaacgacgacgagguccucaucgaggugaacccccccuucggcgacuccuacaucaucguggggcggggcgacagccgccugaccuaccaguggcacaaggagggguccagcaucggcagcacccuggggaaggccuucuccaccacgcucaagggcgcccagcgccuggcggcccugggggacaccgccugggacuucggcagcaucgggggcguguucaacuccaucggccgggccguccaccagguguucgggggcgccuuccgcacccucuucgggggcaugagcuggaucacccaggggcugaugggcgcgcugcuccuguggaugggggugaacgcccgggaccgcuccaucgcccuggccuuccucgcgacgggcggcguccugguguuccuggccaccaacgugcacgccugaggacuagucccuguucccagagcccacuuuuuuuucuuuuuuugaaauaaaauagccugucuuucagaucuaaaaaaaaaaaaaaaaaaaaaaaaaaaaaaaaaaaaaaaaaaaaaaaaaaaaaaaaaaaaaaaaugcaucccccccccccccccccccccccccccccccaaaggcucuuuucagagccaccagaauu

SEQ ID NO: 2094 - RNA, 2371 nt, Artificial Sequence
  mRNA product Design a-4 comprising derived and/or modified sequence from YFV__NC_002031.1__SSjev(V3)-prMEdelstem_TM-JEV (polyprotein: aa122-681) (opt1)
gggagacuccugucgggcggaaguaggaggaguagaguuuaaaaacaguacucuuuuuccgguucgggacguaguugaagcaacgacaagccggauaaccgcucuugagacaggaagcuuaccaugaacgagggcagcaucauguggcuggccucccucgccguggucaucgcgugcgccggggccgugacgcuggugcggaagaaccgcuggcuccugcugaacgucaccuccgaggaccucggcaagaccuucagcguggggaccggcaacugcacgaccaacauccuggaggccaaguacuggugccccgacuccauggaguacaacugcccgaaccugagcccccgggaggagcccgacgacaucgacugcuggugcuacggcguggagaacguccgcguggccuacgggaagugcgacuccgcgggccggagccgccggucccgccgggccaucgaccuccccacccacgagaaccacgggcugaagacccgccaggagaaguggaugacgggccggaugggggagcgccagcugcagaagaucgagcggugguucgugcgcaacccguucuucgccgucaccgcccucaccaucgccuaccuggugggcagcaacaugacccagcggguggucaucgcgcugcucgugcuggccgugggccccgccuacuccgcccacugcaucgggaucacggaccgcgacuucaucgagggcguccacgggggcaccugggugagcgcgacccuggagcaggacaagugcgugaccgucauggcccccgacaagcccucccucgacaucagccuggagacgguggccaucgaccggccggccgaggugcgcaaggucugcuacaacgccgugcugacccacgugaagaucaacgacaagugccccuccaccggcgaggcgcaccucgccgaggagaacgagggggacaacgccugcaagcggaccuacagcgaccggggcugggggaacggcugcgggcuguucggcaagggcuccaucgucgccugcgccaaguucacgugcgcgaagagcaugucccuguucgagguggaccagaccaagauccaguacgucauccgcgcccagcuccacgugggggccaagcaggagaacuggaacaccgacaucaagacccugaaguucgacgcccugagcggcagccaggagguggaguucaucggguacggcaaggccacgcucgagugccagguccagaccgcgguggacuucgggaacuccuacaucgccgagauggagaccgagagcuggaucguggaccggcagugggcccaggaccugacccugcccuggcaguccggcagcggcggggucuggcgcgagaugcaccaccucguggaguucgagcccccgcacgccgccacgauccgggugcuggcgcugggcaaccaggaggggucccucaagaccgcccugaccggcgccaugcgcgucaccaaggacacgaacgacaacaaccuguacaagcuccacgggggccacgugagcugccgggugaagcuguccgcccugacccucaagggcaccagcuacaagaucugcaccgacaagauguucuucgucaagaaccccacggacaccgggcacggcaccguggugaugcaggucaagguguccaagggggcgcccugccgcaucccggugaucgucgccgacgaccugaccgccgccaucaacaagggcauccuggugaccgugaacccgaucgccagcacgaacgacgacgagguccucaucgaggugaacccccccuucggcgacuccuacaucaucguggggcggggcgacagccgccugaccuaccaguggcacaaggagggguccagcaucggcagcacccuggggaaggccuucuccaccacgcucaagggcgcccagcgccuggcggcccugggggacaccgccugggacuucggcagcaucgggggcguguucaacuccaucggccgggccguccaccagguguucgggggcgccuuccgcacccucuucgggggcaugagcuggaucacccaggggcugaugggcgcgcugcuccuguggaugggggugaacgcccgggaccgcuccaucgcccuggccuuccucgcgacgggcggcguccugguguuccuggccaccaacgugcacgccugaggacuagucccuguucccagagcccacuuuuuuuucuuuuuuugaaauaaaauagccugucuuucagaucuaaaaaaaaaaaaaaaaaaaaaaaaaaaaaaaaaaaaaaaaaaaaaaaaaaaaaaaaaaaaaaaaugcaucccccccccccccccccccccccccccccccaaaggcucuuuucagagccaccagaauu

SEQ ID NO: 2095 - RNA, 2386 nt, Artificial Sequence
  mRNA product Design a-4 comprising derived and/or modified sequence from YFV__NC_002031.1__X-SS-prME (polyprotein: aa92-778) (opt1)
gggagacuccugucgggcggaaguaggaggaguagaguuuaaaaacaguacucuuuuuccgguucgggacguaguugaagcaacgacaagccggauaaccgcucuugagacaggaagcuuaccaugcggggccugagcucccgcaagcggcgcagccacgacgugcucaccguccaguuccugauccuggggaugcuccugaugaccggcggggugacgcuggugcggaagaaccgcuggcuccugcugaacgucaccuccgaggaccucggcaagaccuucagcguggggaccggcaacugcacgaccaacauccuggaggccaaguacuggugccccgacuccauggaguacaacugcccgaaccugagcccccgggaggagcccgacgacaucgacugcuggugcuacggcguggagaacguccgcguggccuacgggaagugcgacuccgcgggccggagccgccggucccgccgggccaucgaccuccccacccacgagaaccacgggcugaagacccgccaggagaaguggaugacgggccggaugggggagcgccagcugcagaagaucgagcggugguucgugcgcaacccguucuucgccgucaccgcccucaccaucgccuaccuggugggcagcaacaugacccagcggguggucaucgcgcugcucgugcuggccgugggccccgccuacuccgcccacugcaucgggaucacggaccgcgacuucaucgagggcguccacgggggcaccugggugagcgcgacccuggagcaggacaagugcgugaccgucauggcccccgacaagcccucccucgacaucagccuggagacgguggccaucgaccggccggccgaggugcgcaaggucugcuacaacgccgugcugacccacgugaagaucaacgacaagugccccuccaccggcgaggcgcaccucgccgaggagaacgagggggacaacgccugcaagcggaccuacagcgaccggggcugggggaacggcugcgggcuguucggcaagggcuccaucgucgccugcgccaaguucacgugcgcgaagagcaugucccuguucgagguggaccagaccaagauccaguacgucauccgcgcccagcuccacgugggggccaagcaggagaacuggaacaccgacaucaagacccugaaguucgacgcccugagcggcagccaggagguggaguucaucggguacggcaaggccacgcucgagugccagguccagaccgcgguggacuucgggaacuccuacaucgccgagauggagaccgagagcuggaucguggaccggcagugggcccaggaccugacccugcccuggcaguccggcagcggcggggucuggcgcgagaugcaccaccucguggaguucgagcccccgcacgccgccacgauccgggugcuggcgcugggcaaccaggaggggucccucaagaccgcccugaccggcgccaugcgcgucaccaaggacacgaacgacaacaaccuguacaagcuccacgggggccacgugagcugccgggugaagcuguccgcccugacccucaagggcaccagcuacaagaucugcaccgacaagauguucuucgucaagaaccccacggacaccgggcacggcaccguggugaugcaggucaagguguccaagggggcgcccugccgcaucccggugaucgucgccgacgaccugaccgccgccaucaacaagggcauccuggugaccgugaacccgaucgccagcacgaacgacgacgagguccucaucgaggugaacccccccuucggcgacuccuacaucaucguggggcggggcgacagccgccugaccuaccaguggcacaaggagggguccagcaucggcaagcuguucacccagaccaugaagggggucgagcggcuggcggugaugggcgacacggccugggacuucuccagcgccggcggguucuucaccuccgugggcaaggggauccacaccgucuucggcagcgccuuccaggggcucuucggcggccugaacuggaucaccaaggugaucaugggggccgugcugaucugggucggcaucaacacgcgcaacaugaccauguccaugagcaugauccucgugggggugaucaugauguuccugagccugggcgucggggcgugaggacuagucccuguucccagagcccacuuuuuuuucuuuuuuugaaauaaaauagccugucuuucagaucuaaaaaaaaaaaaaaaaaaaaaaaaaaaaaaaaaaaaaaaaaaaaaaaaaaaaaaaaaaaaaaaaugcaucccccccccccccccccccccccccccccccaaaggcucuuuucagagccaccagaauu

SEQ ID NO: 2096 - RNA, 2389 nt, Artificial Sequence
  mRNA product Design a-4 comprising derived and/or modified sequence from YFV__NC_002031.1__SSjev(V3)-prME-XX (polyprotein: aa122-788) (opt1)
gggagacuccugucgggcggaaguaggaggaguagaguuuaaaaacaguacucuuuuuccgguucgggacguaguugaagcaacgacaagccggauaaccgcucuugagacaggaagcuuaccaugaacgagggcagcaucauguggcuggccucccucgccguggucaucgcgugcgccggggccgugacgcuggugcggaagaaccgcuggcuccugcugaacgucaccuccgaggaccucggcaagaccuucagcguggggaccggcaacugcacgaccaacauccuggaggccaaguacuggugccccgacuccauggaguacaacugcccgaaccugagcccccgggaggagcccgacgacaucgacugcuggugcuacggcguggagaacguccgcguggccuacgggaagugcgacuccgcgggccggagccgccggucccgccgggccaucgaccuccccacccacgagaaccacgggcugaagacccgccaggagaaguggaugacgggccggaugggggagcgccagcugcagaagaucgagcggugguucgugcgcaacccguucuucgccgucaccgcccucaccaucgccuaccuggugggcagcaacaugacccagcggguggucaucgcgcugcucgugcuggccgugggccccgccuacuccgcccacugcaucgggaucacggaccgcgacuucaucgagggcguccacgggggcaccugggugagcgcgacccuggagcaggacaagugcgugaccgucauggcccccgacaagcccucccucgacaucagccuggagacgguggccaucgaccggccggccgaggugcgcaaggucugcuacaacgccgugcugacccacgugaagaucaacgacaagugccccuccaccggcgaggcgcaccucgccgaggagaacgagggggacaacgccugcaagcggaccuacagcgaccggggcugggggaacggcugcgggcuguucggcaagggcuccaucgucgccugcgccaaguucacgugcgcgaagagcaugucccuguucgagguggaccagaccaagauccaguacgucauccgcgcccagcuccacgugggggccaagcaggagaacuggaacaccgacaucaagacccugaaguucgacgcccugagcggcagccaggagguggaguucaucggguacggcaaggccacgcucgagugccagguccagaccgcgguggacuucgggaacuccuacaucgccgagauggagaccgagagcuggaucguggaccggcagugggcccaggaccugacccugcccuggcaguccggcagcggcggggucuggcgcgagaugcaccaccucguggaguucgagcccccgcacgccgccacgauccgggugcuggcgcugggcaaccaggaggggucccucaagaccgcccugaccggcgccaugcgcgucaccaaggacacgaacgacaacaaccuguacaagcuccacgggggccacgugagcugccgggugaagcuguccgcccugacccucaagggcaccagcuacaagaucugcaccgacaagauguucuucgucaagaaccccacggacaccgggcacggcaccguggugaugcaggucaagguguccaagggggcgcccugccgcaucccggugaucgucgccgacgaccugaccgccgccaucaacaagggcauccuggugaccgugaacccgaucgccagcacgaacgacgacgagguccucaucgaggugaacccccccuucggcgacuccuacaucaucguggggcggggcgacagccgccugaccuaccaguggcacaaggagggguccagcaucggcaagcuguucacccagaccaugaagggggucgagcggcuggcggugaugggcgacacggccugggacuucuccagcgccggcggguucuucaccuccgugggcaaggggauccacaccgucuucggcagcgccuuccaggggcucuucggcggccugaacuggaucaccaaggugaucaugggggccgugcugaucugggucggcaucaacacgcgcaacaugaccauguccaugagcaugauccucgugggggugaucaugauguuccugagccugggcgucggggcggaccagggcugcgccaucaacuucggcaagugaggacuagucccuguucccagagcccacuuuuuuuucuuuuuuugaaauaaaauagccugucuuucagaucuaaaaaaaaaaaaaaaaaaaaaaaaaaaaaaaaaaaaaaaaaaaaaaaaaaaaaaaaaaaaaaaaugcaucccccccccccccccccccccccccccccccaaaggcucuuuucagagccaccagaauu

SEQ ID NO: 2097 - RNA, 2398 nt, Artificial Sequence
  mRNA product Design a-4 comprising derived and/or modified sequence from YFV__NC_002031.1__X-SS-prMEdelstem_TM-JEV (polyprotein: aa92-681) (opt1)
gggagacuccugucgggcggaaguaggaggaguagaguuuaaaaacaguacucuuuuuccgguucgggacguaguugaagcaacgacaagccggauaaccgcucuugagacaggaagcuuaccaugcggggccugagcucccgcaagcggcgcagccacgacgugcucaccguccaguuccugauccuggggaugcuccugaugaccggcggggugacgcuggugcggaagaaccgcuggcuccugcugaacgucaccuccgaggaccucggcaagaccuucagcguggggaccggcaacugcacgaccaacauccuggaggccaaguacuggugccccgacuccauggaguacaacugcccgaaccugagcccccgggaggagcccgacgacaucgacugcuggugcuacggcguggagaacguccgcguggccuacgggaagugcgacuccgcgggccggagccgccggucccgccgggccaucgaccuccccacccacgagaaccacgggcugaagacccgccaggagaaguggaugacgggccggaugggggagcgccagcugcagaagaucgagcggugguucgugcgcaacccguucuucgccgucaccgcccucaccaucgccuaccuggugggcagcaacaugacccagcggguggucaucgcgcugcucgugcuggccgugggccccgccuacuccgcccacugcaucgggaucacggaccgcgacuucaucgagggcguccacgggggcaccugggugagcgcgacccuggagcaggacaagugcgugaccgucauggcccccgacaagcccucccucgacaucagccuggagacgguggccaucgaccggccggccgaggugcgcaaggucugcuacaacgccgugcugacccacgugaagaucaacgacaagugccccuccaccggcgaggcgcaccucgccgaggagaacgagggggacaacgccugcaagcggaccuacagcgaccggggcugggggaacggcugcgggcuguucggcaagggcuccaucgucgccugcgccaaguucacgugcgcgaaguccaugagccuguucgagguggaccagaccaagauccaguacgucauccgcgcccagcuccacgugggggccaagcaggagaacuggaacaccgacaucaagacccugaaguucgacgcccugagcggcagccaggagguggaguucaucggguacggcaaggccacgcucgagugccagguccagaccgcgguggacuucgggaacuccuacaucgccgagauggagaccgagagcuggaucguggaccggcagugggcccaggaccugacccugcccuggcaguccggcagcggcggggucuggcgcgagaugcaccaccucguggaguucgagcccccgcacgccgccacgauccgggugcuggcgcugggcaaccaggaggggucccucaagaccgcccugaccggcgccaugcgcgucaccaaggacacgaacgacaacaaccuguacaagcuccacgggggccacgugagcugccgggugaagcuguccgcccugacccucaagggcaccagcuacaagaucugcaccgacaagauguucuucgucaagaaccccacggacaccgggcacggcaccguggugaugcaggucaagguguccaagggggcgcccugccgcaucccggugaucgucgccgacgaccugaccgccgccaucaacaagggcauccuggugaccgugaacccgaucgccagcacgaacgacgacgagguccucaucgaggugaacccccccuucggcgacuccuacaucaucguggggcggggcgacagccgccugaccuaccaguggcacaaggagggguccagcaucggcagcacccuggggaaggccuucuccaccacgcucaagggcgcccagcgccuggcggcccugggggacaccgccugggacuucggcagcaucgggggcguguucaacuccaucggccgggccguccaccagguguucgggggcgccuuccgcacccucuucgggggcaugagcuggaucacccaggggcugaugggcgcgcugcuccuguggaugggggugaacgcccgggaccgcuccaucgcccuggccuuccucgcgacgggcggcguccugguguuccuggccaccaacgugcacgccugaggacuagucccuguucccagagcccacuuuuuuuucuuuuuuugaaauaaaauagccugucuuucagaucuaaaaaaaaaaaaaaaaaaaaaaaaaaaaaaaaaaaaaaaaaaaaaaaaaaaaaaaaaaaaaaaaugcaucccccccccccccccccccccccccccccccaaaggcucuuuucagagccaccagaauu

SEQ ID NO: 2098 - RNA, 2371 nt, Artificial Sequence
  mRNA product Design a-4 comprising derived and/or modified sequence from YFV__NC_002031.1__SSjev(V3)-prMEdelstem_TM-JEV (polyprotein: aa122-681) (opt1)
gggagacuccugucgggcggaaguaggaggaguagaguuuaaaaacaguacucuuuuuccgguucgggacguaguugaagcaacgacaagccggauaaccgcucuugagacaggaagcuuaccaugaacgagggcagcaucauguggcuggccucccucgccguggucaucgcgugcgccggggccgugacgcuggugcggaagaaccgcuggcuccugcugaacgucaccuccgaggaccucggcaagaccuucagcguggggaccggcaacugcacgaccaacauccuggaggccaaguacuggugccccgacuccauggaguacaacugcccgaaccugagcccccgggaggagcccgacgacaucgacugcuggugcuacggcguggagaacguccgcguggccuacgggaagugcgacuccgcgggccggagccgccggucccgccgggccaucgaccuccccacccacgagaaccacgggcugaagacccgccaggagaaguggaugacgggccggaugggggagcgccagcugcagaagaucgagcggugguucgugcgcaacccguucuucgccgucaccgcccucaccaucgccuaccuggugggcagcaacaugacccagcggguggucaucgcgcugcucgugcuggccgugggccccgccuacuccgcccacugcaucgggaucacggaccgcgacuucaucgagggcguccacgggggcaccugggugagcgcgacccuggagcaggacaagugcgugaccgucauggcccccgacaagcccucccucgacaucagccuggagacgguggccaucgaccggccggccgaggugcgcaaggucugcuacaacgccgugcugacccacgugaagaucaacgacaagugccccuccaccggcgaggcgcaccucgccgaggagaacgagggggacaacgccugcaagcggaccuacagcgaccggggcugggggaacggcugcgggcuguucggcaagggcuccaucgucgccugcgccaaguucacgugcgcgaaguccaugagccuguucgagguggaccagaccaagauccaguacgucauccgcgcccagcuccacgugggggccaagcaggagaacuggaacaccgacaucaagacccugaaguucgacgcccugagcggcagccaggagguggaguucaucggguacggcaaggccacgcucgagugccagguccagaccgcgguggacuucgggaacuccuacaucgccgagauggagaccgagagcuggaucguggaccggcagugggcccaggaccugacccugcccuggcaguccggcagcggcggggucuggcgcgagaugcaccaccucguggaguucgagcccccgcacgccgccacgauccgggugcuggcgcugggcaaccaggaggggucccucaagaccgcccugaccggcgccaugcgcgucaccaaggacacgaacgacaacaaccuguacaagcuccacgggggccacgugagcugccgggugaagcuguccgcccugacccucaagggcaccagcuacaagaucugcaccgacaagauguucuucgucaagaaccccacggacaccgggcacggcaccguggugaugcaggucaagguguccaagggggcgcccugccgcaucccggugaucgucgccgacgaccugaccgccgccaucaacaagggcauccuggugaccgugaacccgaucgccagcacgaacgacgacgagguccucaucgaggugaacccccccuucggcgacuccuacaucaucguggggcggggcgacagccgccugaccuaccaguggcacaaggagggguccagcaucggcagcacccuggggaaggccuucuccaccacgcucaagggcgcccagcgccuggcggcccugggggacaccgccugggacuucggcagcaucgggggcguguucaacuccaucggccgggccguccaccagguguucgggggcgccuuccgcacccucuucgggggcaugagcuggaucacccaggggcugaugggcgcgcugcuccuguggaugggggugaacgcccgggaccgcuccaucgcccuggccuuccucgcgacgggcggcguccugguguuccuggccaccaacgugcacgccugaggacuagucccuguucccagagcccacuuuuuuuucuuuuuuugaaauaaaauagccugucuuucagaucuaaaaaaaaaaaaaaaaaaaaaaaaaaaaaaaaaaaaaaaaaaaaaaaaaaaaaaaaaaaaaaaaugcaucccccccccccccccccccccccccccccccaaaggcucuuuucagagccaccagaauu

SEQ ID NO: 2099 - RNA, 2386 nt, Artificial Sequence
  mRNA product Design a-4 comprising derived and/or modified sequence from YFV__NC_002031.1__X-SS-prME (polyprotein: aa92-778) (opt1)
gggagacuccugucgggcggaaguaggaggaguagaguuuaaaaacaguacucuuuuuccgguucgggacguaguugaagcaacgacaagccggauaaccgcucuugagacaggaagcuuaccaugcggggccugagcucccgcaagcggcgcagccacgacgugcucaccguccaguuccugauccuggggaugcuccugaugaccggcggggugacgcuggugcggaagaaccgcuggcuccugcugaacgucaccuccgaggaccucggcaagaccuucagcguggggaccggcaacugcacgaccaacauccuggaggccaaguacuggugccccgacuccauggaguacaacugcccgaaccugagcccccgggaggagcccgacgacaucgacugcuggugcuacggcguggagaacguccgcguggccuacgggaagugcgacuccgcgggccggagccgccggucccgccgggccaucgaccuccccacccacgagaaccacgggcugaagacccgccaggagaaguggaugacgggccggaugggggagcgccagcugcagaagaucgagcggugguucgugcgcaacccguucuucgccgucaccgcccucaccaucgccuaccuggugggcagcaacaugacccagcggguggucaucgcgcugcucgugcuggccgugggccccgccuacuccgcccacugcaucgggaucacggaccgcgacuucaucgagggcguccacgggggcaccugggugagcgcgacccuggagcaggacaagugcgugaccgucauggcccccgacaagcccucccucgacaucagccuggagacgguggccaucgaccggccggccgaggugcgcaaggucugcuacaacgccgugcugacccacgugaagaucaacgacaagugccccuccaccggcgaggcgcaccucgccgaggagaacgagggggacaacgccugcaagcggaccuacagcgaccggggcugggggaacggcugcgggcuguucggcaagggcuccaucgucgccugcgccaaguucacgugcgcgaaguccaugagccuguucgagguggaccagaccaagauccaguacgucauccgcgcccagcuccacgugggggccaagcaggagaacuggaacaccgacaucaagacccugaaguucgacgcccugagcggcagccaggagguggaguucaucggguacggcaaggccacgcucgagugccagguccagaccgcgguggacuucgggaacuccuacaucgccgagauggagaccgagagcuggaucguggaccggcagugggcccaggaccugacccugcccuggcaguccggcagcggcggggucuggcgcgagaugcaccaccucguggaguucgagcccccgcacgccgccacgauccgggugcuggcgcugggcaaccaggaggggucccucaagaccgcccugaccggcgccaugcgcgucaccaaggacacgaacgacaacaaccuguacaagcuccacgggggccacgugagcugccgggugaagcuguccgcccugacccucaagggcaccagcuacaagaucugcaccgacaagauguucuucgucaagaaccccacggacaccgggcacggcaccguggugaugcaggucaagguguccaagggggcgcccugccgcaucccggugaucgucgccgacgaccugaccgccgccaucaacaagggcauccuggugaccgugaacccgaucgccagcacgaacgacgacgagguccucaucgaggugaacccccccuucggcgacuccuacaucaucguggggcggggcgacagccgccugaccuaccaguggcacaaggagggguccagcaucggcaagcuguucacccagaccaugaagggggucgagcggcuggcggugaugggcgacacggccugggacuucuccagcgccggcggguucuucaccuccgugggcaaggggauccacaccgucuucggcagcgccuuccaggggcuguucggcggccucaacuggaucaccaaggugaucaugggggccgugcugaucugggucggcaucaacacgcgcaacaugaccauguccaugagcaugauccucgugggggugaucaugauguuccugagccugggcgucggggcgugaggacuagucccuguucccagagcccacuuuuuuuucuuuuuuugaaauaaaauagccugucuuucagaucuaaaaaaaaaaaaaaaaaaaaaaaaaaaaaaaaaaaaaaaaaaaaaaaaaaaaaaaaaaaaaaaaugcaucccccccccccccccccccccccccccccccaaaggcucuuuucagagccaccagaauu

SEQ ID NO: 2100 - RNA, 2389 nt, Artificial Sequence
  mRNA product Design a-4 comprising derived and/or modified sequence from YFV__NC_002031.1__SSjev(V3)-prME-XX (polyprotein: aa122-788) (opt1)
gggagacuccugucgggcggaaguaggaggaguagaguuuaaaaacaguacucuuuuuccgguucgggacguaguugaagcaacgacaagccggauaaccgcucuugagacaggaagcuuaccaugaacgagggcagcaucauguggcuggccucccucgccguggucaucgcgugcgccggggccgugacgcuggugcggaagaaccgcuggcuccugcugaacgucaccuccgaggaccucggcaagaccuucagcguggggaccggcaacugcacgaccaacauccuggaggccaaguacuggugccccgacuccauggaguacaacugcccgaaccugagcccccgggaggagcccgacgacaucgacugcuggugcuacggcguggagaacguccgcguggccuacgggaagugcgacuccgcgggccggagccgccggucccgccgggccaucgaccuccccacccacgagaaccacgggcugaagacccgccaggagaaguggaugacgggccggaugggggagcgccagcugcagaagaucgagcggugguucgugcgcaacccguucuucgccgucaccgcccucaccaucgccuaccuggugggcagcaacaugacccagcggguggucaucgcgcugcucgugcuggccgugggccccgccuacuccgcccacugcaucgggaucacggaccgcgacuucaucgagggcguccacgggggcaccugggugagcgcgacccuggagcaggacaagugcgugaccgucauggcccccgacaagcccucccucgacaucagccuggagacgguggccaucgaccggccggccgaggugcgcaaggucugcuacaacgccgugcugacccacgugaagaucaacgacaagugccccuccaccggcgaggcgcaccucgccgaggagaacgagggggacaacgccugcaagcggaccuacagcgaccggggcugggggaacggcugcgggcuguucggcaagggcuccaucgucgccugcgccaaguucacgugcgcgaaguccaugagccuguucgagguggaccagaccaagauccaguacgucauccgcgcccagcuccacgugggggccaagcaggagaacuggaacaccgacaucaagacccugaaguucgacgcccugagcggcagccaggagguggaguucaucggguacggcaaggccacgcucgagugccagguccagaccgcgguggacuucgggaacuccuacaucgccgagauggagaccgagagcuggaucguggaccggcagugggcccaggaccugacccugcccuggcaguccggcagcggcggggucuggcgcgagaugcaccaccucguggaguucgagcccccgcacgccgccacgauccgggugcuggcgcugggcaaccaggaggggucccucaagaccgcccugaccggcgccaugcgcgucaccaaggacacgaacgacaacaaccuguacaagcuccacgggggccacgugagcugccgggugaagcuguccgcccugacccucaagggcaccagcuacaagaucugcaccgacaagauguucuucgucaagaaccccacggacaccgggcacggcaccguggugaugcaggucaagguguccaagggggcgcccugccgcaucccggugaucgucgccgacgaccugaccgccgccaucaacaagggcauccuggugaccgugaacccgaucgccagcacgaacgacgacgagguccucaucgaggugaacccccccuucggcgacuccuacaucaucguggggcggggcgacagccgccugaccuaccaguggcacaaggagggguccagcaucggcaagcuguucacccagaccaugaagggggucgagcggcuggcggugaugggcgacacggccugggacuucuccagcgccggcggguucuucaccuccgugggcaaggggauccacaccgucuucggcagcgccuuccaggggcuguucggcggccucaacuggaucaccaaggugaucaugggggccgugcugaucugggucggcaucaacacgcgcaacaugaccauguccaugagcaugauccucgugggggugaucaugauguuccugagccugggcgucggggcggaccagggcugcgccaucaacuucggcaagugaggacuagucccuguucccagagcccacuuuuuuuucuuuuuuugaaauaaaauagccugucuuucagaucuaaaaaaaaaaaaaaaaaaaaaaaaaaaaaaaaaaaaaaaaaaaaaaaaaaaaaaaaaaaaaaaaugcaucccccccccccccccccccccccccccccccaaaggcucuuuucagagccaccagaauu

SEQ ID NO: 2101 - RNA, 2398 nt, Artificial Sequence
  mRNA product Design a-4 comprising derived and/or modified sequence from YFV__NC_002031.1__X-SS-prMEdelstem_TM-JEV (polyprotein: aa92-681) (opt1)
gggagacuccugucgggcggaaguaggaggaguagaguuuaaaaacaguacucuuuuuccgguucgggacguaguugaagcaacgacaagccggauaaccgcucuugagacaggaagcuuaccaugcggggccugagcucccgcaagcggcgcagccacgacgugcucaccguccaguuccugauccuggggaugcuccugaugaccggcggggugacgcuggugcggaagaaccgcuggcuccugcugaacgucaccuccgaggaccucggcaagaccuucagcguggggaccggcaacugcacgaccaacauccuggaggccaaguacuggugccccgacuccauggaguacaacugccccaaccugagcccccgggaggagcccgacgacaucgacugcuggugcuacggcguggagaacguccgcguggccuacgggaagugcgacuccgcgggccggagccgccggucccgccgggccaucgaccuccccacccacgagaaccacgggcugaagacccgccaggagaaguggaugacgggccggaugggggagcgccagcugcagaagaucgagcggugguucgugcgcaacccguucuucgccgucaccgcccucaccaucgccuaccuggugggcagcaacaugacccagcggguggucaucgcgcugcucgugcuggccgugggccccgccuacuccgcccacugcaucgggaucacggaccgcgacuucaucgagggcguccacgggggcaccugggugagcgcgacccuggagcaggacaagugcgugaccgucauggcccccgacaagcccucccucgacaucagccuggagacgguggccaucgaccggccggccgaggugcgcaaggucugcuacaacgccgugcugacccacgugaagaucaacgacaagugccccuccaccggcgaggcgcaccucgccgaggagaacgagggggacaacgccugcaagcggaccuacagcgaccggggcugggggaacggcugcgggcuguucggcaagggcuccaucgucgccugcgccaaguucacgugcgcgaaguccaugagccuguucgagguggaccagaccaagauccaguacgucauccgcgcccagcuccacgugggggccaagcaggagaacuggaacaccgacaucaagacccugaaguucgacgcccugagcggcagccaggagguggaguucaucggguacggcaaggccacgcucgagugccagguccagaccgcgguggacuucgggaacuccuacaucgccgagauggagaccgagagcuggaucguggaccggcagugggcccaggaccugacccugcccuggcaguccggcagcggcggggucuggcgcgagaugcaccaccucguggaguucgagcccccgcacgccgccacgauccgggugcuggcgcugggcaaccaggaggggucccucaagaccgcccugaccggcgccaugcgcgucaccaaggacacgaacgacaacaaccuguacaagcuccacgggggccacgugagcugccgggugaagcuguccgcccugacccucaagggcaccagcuacaagaucugcaccgacaagauguucuucgucaagaaccccacggacaccgggcacggcaccguggugaugcaggucaagguguccaagggggcgcccugccgcaucccggugaucgucgccgacgaccugaccgccgccaucaacaagggcauccuggugaccgugaacccgaucgccagcacgaacgacgacgagguccucaucgaggugaacccgcccuucggcgacuccuacaucaucguggggcggggcgacagccgccugaccuaccaguggcacaaggagggguccagcaucggaagcacgcugggcaaggccuuuucaacaacuuugaagggagcucaaagacuggcagcguugggcgacacagccugggacuuuggcucuauuggaggggucuucaacuccauagguagagccguucaccaaguguuuggaggugccuucagaacacucuuugggggaaugucuuggaucacacaagggcuaaugggugcccuacugcucuggaugggcgucaacgcacgagaccgaucaauugcuuuggccuucuuagccacaggaggugugcucguguucuuagcgaccaaugugcacgccugaggacuagucccuguucccagagcccacuuuuuuuucuuuuuuugaaauaaaauagccugucuuucagaucuaaaaaaaaaaaaaaaaaaaaaaaaaaaaaaaaaaaaaaaaaaaaaaaaaaaaaaaaaaaaaaaaugcaucccccccccccccccccccccccccccccccaaaggcucuuuucagagccaccagaauu

SEQ ID NO: 2102 - RNA, 2371 nt, Artificial Sequence
  mRNA product Design a-4 comprising derived and/or modified sequence from YFV__NC_002031.1__SSjev(V3)-prMEdelstem_TM-JEV (polyprotein: aa122-681) (opt1)
gggagacuccugucgggcggaaguaggaggaguagaguuuaaaaacaguacucuuuuuccgguucgggacguaguugaagcaacgacaagccggauaaccgcucuugagacaggaagcuuaccaugaacgagggcagcaucauguggcuggccucccucgccguggucaucgcgugcgccggggccgugacgcuggugcggaagaaccgcuggcuccugcugaacgucaccuccgaggaccucggcaagaccuucagcguggggaccggcaacugcacgaccaacauccuggaggccaaguacuggugccccgacuccauggaguacaacugccccaaccugagcccccgggaggagcccgacgacaucgacugcuggugcuacggcguggagaacguccgcguggccuacgggaagugcgacuccgcgggccggagccgccggucccgccgggccaucgaccuccccacccacgagaaccacgggcugaagacccgccaggagaaguggaugacgggccggaugggggagcgccagcugcagaagaucgagcggugguucgugcgcaacccguucuucgccgucaccgcccucaccaucgccuaccuggugggcagcaacaugacccagcggguggucaucgcgcugcucgugcuggccgugggccccgccuacuccgcccacugcaucgggaucacggaccgcgacuucaucgagggcguccacgggggcaccugggugagcgcgacccuggagcaggacaagugcgugaccgucauggcccccgacaagcccucccucgacaucagccuggagacgguggccaucgaccggccggccgaggugcgcaaggucugcuacaacgccgugcugacccacgugaagaucaacgacaagugccccuccaccggcgaggcgcaccucgccgaggagaacgagggggacaacgccugcaagcggaccuacagcgaccggggcugggggaacggcugcgggcuguucggcaagggcuccaucgucgccugcgccaaguucacgugcgcgaaguccaugagccuguucgagguggaccagaccaagauccaguacgucauccgcgcccagcuccacgugggggccaagcaggagaacuggaacaccgacaucaagacccugaaguucgacgcccugagcggcagccaggagguggaguucaucggguacggcaaggccacgcucgagugccagguccagaccgcgguggacuucgggaacuccuacaucgccgagauggagaccgagagcuggaucguggaccggcagugggcccaggaccugacccugcccuggcaguccggcagcggcggggucuggcgcgagaugcaccaccucguggaguucgagcccccgcacgccgccacgauccgggugcuggcgcugggcaaccaggaggggucccucaagaccgcccugaccggcgccaugcgcgucaccaaggacacgaacgacaacaaccuguacaagcuccacgggggccacgugagcugccgggugaagcuguccgcccugacccucaagggcaccagcuacaagaucugcaccgacaagauguucuucgucaagaaccccacggacaccgggcacggcaccguggugaugcaggucaagguguccaagggggcgcccugccgcaucccggugaucgucgccgacgaccugaccgccgccaucaacaagggcauccuggugaccgugaacccgaucgccagcacgaacgacgacgagguccucaucgaggugaacccgcccuucggcgacuccuacaucaucguggggcggggcgacagccgccugaccuaccaguggcacaaggagggguccagcaucggcagcacccuggggaaggccuucuccaccacgcucaagggcgcccagcgccuggcggcccugggggacaccgccugggacuucggcagcaucgggggcguguucaacuccaucggccgggccguccaccagguguucgggggcgccuuccgcacccucuucgggggcaugagcuggaucacccaggggcugaugggcgcgcugcuccuguggaugggggugaacgcccgggaccgcuccaucgcccuggccuuccucgcgacgggcggcguccugguguuccuggccaccaacgugcacgccugaggacuagucccuguucccagagcccacuuuuuuuucuuuuuuugaaauaaaauagccugucuuucagaucuaaaaaaaaaaaaaaaaaaaaaaaaaaaaaaaaaaaaaaaaaaaaaaaaaaaaaaaaaaaaaaaaugcaucccccccccccccccccccccccccccccccaaaggcucuuuucagagccaccagaauu

SEQ ID NO: 2103 - RNA, 2386 nt, Artificial Sequence
  mRNA product Design a-4 comprising derived and/or modified sequence from YFV__NC_002031.1__X-SS-prME (polyprotein: aa92-778) (opt1)
gggagacuccugucgggcggaaguaggaggaguagaguuuaaaaacaguacucuuuuuccgguucgggacguaguugaagcaacgacaagccggauaaccgcucuugagacaggaagcuuaccaugcggggccugagcucccgcaagcggcgcagccacgacgugcucaccguccaguuccugauccuggggaugcuccugaugaccggcggggugacgcuggugcggaagaaccgcuggcuccugcugaacgucaccuccgaggaccucggcaagaccuucagcguggggaccggcaacugcacgaccaacauccuggaggccaaguacuggugccccgacuccauggaguacaacugccccaaccugagcccccgggaggagcccgacgacaucgacugcuggugcuacggcguggagaacguccgcguggccuacgggaagugcgacuccgcgggccggagccgccggucccgccgggccaucgaccuccccacccacgagaaccacgggcugaagacccgccaggagaaguggaugacgggccggaugggggagcgccagcugcagaagaucgagcggugguucgugcgcaacccguucuucgccgucaccgcccucaccaucgccuaccuggugggcagcaacaugacccagcggguggucaucgcgcugcucgugcuggccgugggccccgccuacuccgcccacugcaucgggaucacggaccgcgacuucaucgagggcguccacgggggcaccugggugagcgcgacccuggagcaggacaagugcgugaccgucauggcccccgacaagcccucccucgacaucagccuggagacgguggccaucgaccggccggccgaggugcgcaaggucugcuacaacgccgugcugacccacgugaagaucaacgacaagugccccuccaccggcgaggcgcaccucgccgaggagaacgagggggacaacgccugcaagcggaccuacagcgaccggggcugggggaacggcugcgggcuguucggcaagggcuccaucgucgccugcgccaaguucacgugcgcgaaguccaugagccuguucgagguggaccagaccaagauccaguacgucauccgcgcccagcuccacgugggggccaagcaggagaacuggaacaccgacaucaagacccugaaguucgacgcccugagcggcagccaggagguggaguucaucggguacggcaaggccacgcucgagugccagguccagaccgcgguggacuucgggaacuccuacaucgccgagauggagaccgagagcuggaucguggaccggcagugggcccaggaccugacccugcccuggcaguccggcagcggcggggucuggcgcgagaugcaccaccucguggaguucgagcccccgcacgccgccacgauccgggugcuggcgcugggcaaccaggaggggucccucaagaccgcccugaccggcgccaugcgcgucaccaaggacacgaacgacaacaaccuguacaagcuccacgggggccacgugagcugccgggugaagcuguccgcccugacccucaagggcaccagcuacaagaucugcaccgacaagauguucuucgucaagaaccccacggacaccgggcacggcaccguggugaugcaggucaagguguccaagggggcgcccugccgcaucccggugaucgucgccgacgaccugaccgccgccaucaacaagggcauccuggugaccgugaacccgaucgccagcacgaacgacgacgagguccucaucgaggugaacccgcccuucggcgacuccuacaucaucguggggcggggcgacagccgccugaccuaccaguggcacaaggagggguccagcaucggcaagcuguucacccagaccaugaagggggucgagcggcuggcggugaugggcgacacggccugggacuucuccagcgccggcggguucuucaccuccgugggcaaggggauccacaccgucuucggcagcgccuuccaggggcuguucggcggccucaacuggaucaccaaggugaucaugggggccgugcugaucugggucggcaucaacacgcgcaacaugaccauguccaugagcaugauccucgugggggugaucaugauguuccugagccugggcgucggggcgugaggacuagucccuguucccagagcccacuuuuuuuucuuuuuuugaaauaaaauagccugucuuucagaucuaaaaaaaaaaaaaaaaaaaaaaaaaaaaaaaaaaaaaaaaaaaaaaaaaaaaaaaaaaaaaaaaugcaucccccccccccccccccccccccccccccccaaaggcucuuuucagagccaccagaauu

SEQ ID NO: 2104 - RNA, 2389 nt, Artificial Sequence
  mRNA product Design a-4 comprising derived and/or modified sequence from YFV__NC_002031.1__SSjev(V3)-prME-XX (polyprotein: aa122-788) (opt1)
gggagacuccugucgggcggaaguaggaggaguagaguuuaaaaacaguacucuuuuuccgguucgggacguaguugaagcaacgacaagccggauaaccgcucuugagacaggaagcuuaccaugaacgagggcagcaucauguggcuggccucccucgccguggucaucgcgugcgccggggccgugacgcuggugcggaagaaccgcuggcuccugcugaacgucaccuccgaggaccucggcaagaccuucagcguggggaccggcaacugcacgaccaacauccuggaggccaaguacuggugccccgacuccauggaguacaacugccccaaccugagcccccgggaggagcccgacgacaucgacugcuggugcuacggcguggagaacguccgcguggccuacgggaagugcgacuccgcgggccggagccgccggucccgccgggccaucgaccuccccacccacgagaaccacgggcugaagacccgccaggagaaguggaugacgggccggaugggggagcgccagcugcagaagaucgagcggugguucgugcgcaacccguucuucgccgucaccgcccucaccaucgccuaccuggugggcagcaacaugacccagcggguggucaucgcgcugcucgugcuggccgugggccccgccuacuccgcccacugcaucgggaucacggaccgcgacuucaucgagggcguccacgggggcaccugggugagcgcgacccuggagcaggacaagugcgugaccgucauggcccccgacaagcccucccucgacaucagccuggagacgguggccaucgaccggccggccgaggugcgcaaggucugcuacaacgccgugcugacccacgugaagaucaacgacaagugccccuccaccggcgaggcgcaccucgccgaggagaacgagggggacaacgccugcaagcggaccuacagcgaccggggcugggggaacggcugcgggcuguucggcaagggcuccaucgucgccugcgccaaguucacgugcgcgaaguccaugagccuguucgagguggaccagaccaagauccaguacgucauccgcgcccagcuccacgugggggccaagcaggagaacuggaacaccgacaucaagacccugaaguucgacgcccugagcggcagccaggagguggaguucaucggguacggcaaggccacgcucgagugccagguccagaccgcgguggacuucgggaacuccuacaucgccgagauggagaccgagagcuggaucguggaccggcagugggcccaggaccugacccugcccuggcaguccggcagcggcggggucuggcgcgagaugcaccaccucguggaguucgagcccccgcacgccgccacgauccgggugcuggcgcugggcaaccaggaggggucccucaagaccgcccugaccggcgccaugcgcgucaccaaggacacgaacgacaacaaccuguacaagcuccacgggggccacgugagcugccgggugaagcuguccgcccugacccucaagggcaccagcuacaagaucugcaccgacaagauguucuucgucaagaaccccacggacaccgggcacggcaccguggugaugcaggucaagguguccaagggggcgcccugccgcaucccggugaucgucgccgacgaccugaccgccgccaucaacaagggcauccuggugaccgugaacccgaucgccagcacgaacgacgacgagguccucaucgaggugaacccgcccuucggcgacuccuacaucaucguggggcggggcgacagccgccugaccuaccaguggcacaaggagggguccagcaucggcaagcuguucacccagaccaugaagggggucgagcggcuggcggugaugggcgacacggccugggacuucuccagcgccggcggguucuucaccuccgugggcaaggggauccacaccgucuucggcagcgccuuccaggggcuguucggcggccucaacuggaucaccaaggugaucaugggggccgugcugaucugggucggcaucaacacgcgcaacaugaccauguccaugagcaugauccucgugggggugaucaugauguuccugagccugggcgucggggcggaccagggcugcgccaucaacuucggcaagugaggacuagucccuguucccagagcccacuuuuuuuucuuuuuuugaaauaaaauagccugucuuucagaucuaaaaaaaaaaaaaaaaaaaaaaaaaaaaaaaaaaaaaaaaaaaaaaaaaaaaaaaaaaaaaaaaugcaucccccccccccccccccccccccccccccccaaaggcucuuuucagagccaccagaauu

SEQ ID NO: 2105 - RNA, 2398 nt, Artificial Sequence
  mRNA product Design a-4 comprising derived and/or modified sequence from YFV__NC_002031.1__X-SS-prMEdelstem_TM-JEV (polyprotein: aa92-681) (opt2)
gggagacuccugucgggcggaaguaggaggaguagaguuuaaaaacaguacucuuuuuccgguucgggacguaguugaagcaacgacaagccggauaaccgcucuugagacaggaagcuuaccaugcgcggccucuccucccgcaagcgccgcucccacgacguccucaccguccaguuccucauccucggcaugcuccucaugaccggcggcgucacccucguccgcaagaaccgcuggcuccuccucaacgucaccuccgaggaccucggcaagaccuucuccgucggcaccggcaacugcaccaccaacauccucgaggccaaguacuggugccccgacuccauggaguacaacugccccaaccucuccccccgcgaggagcccgacgacaucgacugcuggugcuacggcgucgagaacguccgcgucgccuacggcaagugcgacuccgccggccgcucccgccgcucccgccgcgccaucgaccuccccacccacgagaaccacggccucaagacccgccaggagaaguggaugaccggccgcaugggcgagcgccagcuccagaagaucgagcgcugguucguccgcaaccccuucuucgccgucaccgcccucaccaucgccuaccucgucggcuccaacaugacccagcgcgucgucaucgcccuccucguccucgccgucggccccgccuacuccgcccacugcaucggcaucaccgaccgcgacuucaucgagggcguccacggcggcaccugggucuccgccacccucgagcaggacaagugcgucaccgucauggcccccgacaagcccucccucgacaucucccucgagaccgucgccaucgaccgccccgccgagguccgcaaggucugcuacaacgccguccucacccacgucaagaucaacgacaagugccccuccaccggcgaggcccaccucgccgaggagaacgagggcgacaacgccugcaagcgcaccuacuccgaccgcggcuggggcaacggcugcggccucuucggcaagggcuccaucgucgccugcgccaaguucaccugcgccaaguccaugucccucuucgaggucgaccagaccaagauccaguacgucauccgcgcccagcuccacgucggcgccaagcaggagaacuggaacaccgacaucaagacccucaaguucgacgcccucuccggcucccaggaggucgaguucaucggcuacggcaaggccacccucgagugccagguccagaccgccgucgacuucggcaacuccuacaucgccgagauggagaccgaguccuggaucgucgaccgccagugggcccaggaccucacccuccccuggcaguccggcuccggcggcgucuggcgcgagaugcaccaccucgucgaguucgagcccccccacgccgccaccauccgcguccucgcccucggcaaccaggagggcucccucaagaccgcccucaccggcgccaugcgcgucaccaaggacaccaacgacaacaaccucuacaagcuccacggcggccacgucuccugccgcgucaagcucuccgcccucacccucaagggcaccuccuacaagaucugcaccgacaagauguucuucgucaagaaccccaccgacaccggccacggcaccgucgucaugcaggucaaggucuccaagggcgcccccugccgcauccccgucaucgucgccgacgaccucaccgccgccaucaacaagggcauccucgucaccgucaaccccaucgccuccaccaacgacgacgagguccucaucgaggucaacccccccuucggcgacuccuacaucaucgucggccgcggcgacucccgccucaccuaccaguggcacaaggagggcuccuccaucggcuccacccucggcaaggccuucuccaccacccucaagggcgcccagcgccucgccgcccucggcgacaccgccugggacuucggcuccaucggcggcgucuucaacuccaucggccgcgccguccaccaggucuucggcggcgccuuccgcacccucuucggcggcauguccuggaucacccagggccucaugggcgcccuccuccucuggaugggcgucaacgcccgcgaccgcuccaucgcccucgccuuccucgccaccggcggcguccucgucuuccucgccaccaacguccacgccugaggacuagucccuguucccagagcccacuuuuuuuucuuuuuuugaaauaaaauagccugucuuucagaucuaaaaaaaaaaaaaaaaaaaaaaaaaaaaaaaaaaaaaaaaaaaaaaaaaaaaaaaaaaaaaaaaugcaucccccccccccccccccccccccccccccccaaaggcucuuuucagagccaccagaauu

SEQ ID NO: 2106 - RNA, 2371 nt, Artificial Sequence
  mRNA product Design a-4 comprising derived and/or modified sequence from YFV__NC_002031.1__SSjev(V3)-prMEdelstem_TM-JEV (polyprotein: aa122-681) (opt2)
gggagacuccugucgggcggaaguaggaggaguagaguuuaaaaacaguacucuuuuuccgguucgggacguaguugaagcaacgacaagccggauaaccgcucuugagacaggaagcuuaccaugaacgagggcuccaucauguggcucgccucccucgccgucgucaucgccugcgccggcgccgucacccucguccgcaagaaccgcuggcuccuccucaacgucaccuccgaggaccucggcaagaccuucuccgucggcaccggcaacugcaccaccaacauccucgaggccaaguacuggugccccgacuccauggaguacaacugccccaaccucuccccccgcgaggagcccgacgacaucgacugcuggugcuacggcgucgagaacguccgcgucgccuacggcaagugcgacuccgccggccgcucccgccgcucccgccgcgccaucgaccuccccacccacgagaaccacggccucaagacccgccaggagaaguggaugaccggccgcaugggcgagcgccagcuccagaagaucgagcgcugguucguccgcaaccccuucuucgccgucaccgcccucaccaucgccuaccucgucggcuccaacaugacccagcgcgucgucaucgcccuccucguccucgccgucggccccgccuacuccgcccacugcaucggcaucaccgaccgcgacuucaucgagggcguccacggcggcaccugggucuccgccacccucgagcaggacaagugcgucaccgucauggcccccgacaagcccucccucgacaucucccucgagaccgucgccaucgaccgccccgccgagguccgcaaggucugcuacaacgccguccucacccacgucaagaucaacgacaagugccccuccaccggcgaggcccaccucgccgaggagaacgagggcgacaacgccugcaagcgcaccuacuccgaccgcggcuggggcaacggcugcggccucuucggcaagggcuccaucgucgccugcgccaaguucaccugcgccaaguccaugucccucuucgaggucgaccagaccaagauccaguacgucauccgcgcccagcuccacgucggcgccaagcaggagaacuggaacaccgacaucaagacccucaaguucgacgcccucuccggcucccaggaggucgaguucaucggcuacggcaaggccacccucgagugccagguccagaccgccgucgacuucggcaacuccuacaucgccgagauggagaccgaguccuggaucgucgaccgccagugggcccaggaccucacccuccccuggcaguccggcuccggcggcgucuggcgcgagaugcaccaccucgucgaguucgagcccccccacgccgccaccauccgcguccucgcccucggcaaccaggagggcucccucaagaccgcccucaccggcgccaugcgcgucaccaaggacaccaacgacaacaaccucuacaagcuccacggcggccacgucuccugccgcgucaagcucuccgcccucacccucaagggcaccuccuacaagaucugcaccgacaagauguucuucgucaagaaccccaccgacaccggccacggcaccgucgucaugcaggucaaggucuccaagggcgcccccugccgcauccccgucaucgucgccgacgaccucaccgccgccaucaacaagggcauccucgucaccgucaaccccaucgccuccaccaacgacgacgagguccucaucgaggucaacccccccuucggcgacuccuacaucaucgucggccgcggcgacucccgccucaccuaccaguggcacaaggagggcuccuccaucggcuccacccucggcaaggccuucuccaccacccucaagggcgcccagcgccucgccgcccucggcgacaccgccugggacuucggcuccaucggcggcgucuucaacuccaucggccgcgccguccaccaggucuucggcggcgccuuccgcacccucuucggcggcauguccuggaucacccagggccucaugggcgcccuccuccucuggaugggcgucaacgcccgcgaccgcuccaucgcccucgccuuccucgccaccggcggcguccucgucuuccucgccaccaacguccacgccugaggacuagucccuguucccagagcccacuuuuuuuucuuuuuuugaaauaaaauagccugucuuucagaucuaaaaaaaaaaaaaaaaaaaaaaaaaaaaaaaaaaaaaaaaaaaaaaaaaaaaaaaaaaaaaaaaugcaucccccccccccccccccccccccccccccccaaaggcucuuuucagagccaccagaauu

SEQ ID NO: 2107 - RNA, 2386 nt, Artificial Sequence
  mRNA product Design a-4 comprising derived and/or modified sequence from YFV__NC_002031.1__X-SS-prME (polyprotein: aa92-778) (opt2)
gggagacuccugucgggcggaaguaggaggaguagaguuuaaaaacaguacucuuuuuccgguucgggacguaguugaagcaacgacaagccggauaaccgcucuugagacaggaagcuuaccaugcgcggccucuccucccgcaagcgccgcucccacgacguccucaccguccaguuccucauccucggcaugcuccucaugaccggcggcgucacccucguccgcaagaaccgcuggcuccuccucaacgucaccuccgaggaccucggcaagaccuucuccgucggcaccggcaacugcaccaccaacauccucgaggccaaguacuggugccccgacuccauggaguacaacugccccaaccucuccccccgcgaggagcccgacgacaucgacugcuggugcuacggcgucgagaacguccgcgucgccuacggcaagugcgacuccgccggccgcucccgccgcucccgccgcgccaucgaccuccccacccacgagaaccacggccucaagacccgccaggagaaguggaugaccggccgcaugggcgagcgccagcuccagaagaucgagcgcugguucguccgcaaccccuucuucgccgucaccgcccucaccaucgccuaccucgucggcuccaacaugacccagcgcgucgucaucgcccuccucguccucgccgucggccccgccuacuccgcccacugcaucggcaucaccgaccgcgacuucaucgagggcguccacggcggcaccugggucuccgccacccucgagcaggacaagugcgucaccgucauggcccccgacaagcccucccucgacaucucccucgagaccgucgccaucgaccgccccgccgagguccgcaaggucugcuacaacgccguccucacccacgucaagaucaacgacaagugccccuccaccggcgaggcccaccucgccgaggagaacgagggcgacaacgccugcaagcgcaccuacuccgaccgcggcuggggcaacggcugcggccucuucggcaagggcuccaucgucgccugcgccaaguucaccugcgccaaguccaugucccucuucgaggucgaccagaccaagauccaguacgucauccgcgcccagcuccacgucggcgccaagcaggagaacuggaacaccgacaucaagacccucaaguucgacgcccucuccggcucccaggaggucgaguucaucggcuacggcaaggccacccucgagugccagguccagaccgccgucgacuucggcaacuccuacaucgccgagauggagaccgaguccuggaucgucgaccgccagugggcccaggaccucacccuccccuggcaguccggcuccggcggcgucuggcgcgagaugcaccaccucgucgaguucgagcccccccacgccgccaccauccgcguccucgcccucggcaaccaggagggcucccucaagaccgcccucaccggcgccaugcgcgucaccaaggacaccaacgacaacaaccucuacaagcuccacggcggccacgucuccugccgcgucaagcucuccgcccucacccucaagggcaccuccuacaagaucugcaccgacaagauguucuucgucaagaaccccaccgacaccggccacggcaccgucgucaugcaggucaaggucuccaagggcgcccccugccgcauccccgucaucgucgccgacgaccucaccgccgccaucaacaagggcauccucgucaccgucaaccccaucgccuccaccaacgacgacgagguccucaucgaggucaacccccccuucggcgacuccuacaucaucgucggccgcggcgacucccgccucaccuaccaguggcacaaggagggcuccuccaucggcaagcucuucacccagaccaugaagggcgucgagcgccucgccgucaugggcgacaccgccugggacuucuccuccgccggcggcuucuucaccuccgucggcaagggcauccacaccgucuucggcuccgccuuccagggccucuucggcggccucaacuggaucaccaaggucaucaugggcgccguccucaucugggucggcaucaacacccgcaacaugaccauguccauguccaugauccucgucggcgucaucaugauguuccucucccucggcgucggcgccugaggacuagucccuguucccagagcccacuuuuuuuucuuuuuuugaaauaaaauagccugucuuucagaucuaaaaaaaaaaaaaaaaaaaaaaaaaaaaaaaaaaaaaaaaaaaaaaaaaaaaaaaaaaaaaaaaugcaucccccccccccccccccccccccccccccccaaaggcucuuuucagagccaccagaauu

SEQ ID NO: 2108 - RNA, 2389 nt, Artificial Sequence
  mRNA product Design a-4 comprising derived and/or modified sequence from YFV__NC_002031.1__SSjev(V3)-prME-XX (polyprotein: aa122-788) (opt2)
gggagacuccugucgggcggaaguaggaggaguagaguuuaaaaacaguacucuuuuuccgguucgggacguaguugaagcaacgacaagccggauaaccgcucuugagacaggaagcuuaccaugaacgagggcuccaucauguggcucgccucccucgccgucgucaucgccugcgccggcgccgucacccucguccgcaagaaccgcuggcuccuccucaacgucaccuccgaggaccucggcaagaccuucuccgucggcaccggcaacugcaccaccaacauccucgaggccaaguacuggugccccgacuccauggaguacaacugccccaaccucuccccccgcgaggagcccgacgacaucgacugcuggugcuacggcgucgagaacguccgcgucgccuacggcaagugcgacuccgccggccgcucccgccgcucccgccgcgccaucgaccuccccacccacgagaaccacggccucaagacccgccaggagaaguggaugaccggccgcaugggcgagcgccagcuccagaagaucgagcgcugguucguccgcaaccccuucuucgccgucaccgcccucaccaucgccuaccucgucggcuccaacaugacccagcgcgucgucaucgcccuccucguccucgccgucggccccgccuacuccgcccacugcaucggcaucaccgaccgcgacuucaucgagggcguccacggcggcaccugggucuccgccacccucgagcaggacaagugcgucaccgucauggcccccgacaagcccucccucgacaucucccucgagaccgucgccaucgaccgccccgccgagguccgcaaggucugcuacaacgccguccucacccacgucaagaucaacgacaagugccccuccaccggcgaggcccaccucgccgaggagaacgagggcgacaacgccugcaagcgcaccuacuccgaccgcggcuggggcaacggcugcggccucuucggcaagggcuccaucgucgccugcgccaaguucaccugcgccaaguccaugucccucuucgaggucgaccagaccaagauccaguacgucauccgcgcccagcuccacgucggcgccaagcaggagaacuggaacaccgacaucaagacccucaaguucgacgcccucuccggcucccaggaggucgaguucaucggcuacggcaaggccacccucgagugccagguccagaccgccgucgacuucggcaacuccuacaucgccgagauggagaccgaguccuggaucgucgaccgccagugggcccaggaccucacccuccccuggcaguccggcuccggcggcgucuggcgcgagaugcaccaccucgucgaguucgagcccccccacgccgccaccauccgcguccucgcccucggcaaccaggagggcucccucaagaccgcccucaccggcgccaugcgcgucaccaaggacaccaacgacaacaaccucuacaagcuccacggcggccacgucuccugccgcgucaagcucuccgcccucacccucaagggcaccuccuacaagaucugcaccgacaagauguucuucgucaagaaccccaccgacaccggccacggcaccgucgucaugcaggucaaggucuccaagggcgcccccugccgcauccccgucaucgucgccgacgaccucaccgccgccaucaacaagggcauccucgucaccgucaaccccaucgccuccaccaacgacgacgagguccucaucgaggucaacccccccuucggcgacuccuacaucaucgucggccgcggcgacucccgccucaccuaccaguggcacaaggagggcuccuccaucggcaagcucuucacccagaccaugaagggcgucgagcgccucgccgucaugggcgacaccgccugggacuucuccuccgccggcggcuucuucaccuccgucggcaagggcauccacaccgucuucggcuccgccuuccagggccucuucggcggccucaacuggaucaccaaggucaucaugggcgccguccucaucugggucggcaucaacacccgcaacaugaccauguccauguccaugauccucgucggcgucaucaugauguuccucucccucggcgucggcgccgaccagggcugcgccaucaacuucggcaagugaggacuagucccuguucccagagcccacuuuuuuuucuuuuuuugaaauaaaauagccugucuuucagaucuaaaaaaaaaaaaaaaaaaaaaaaaaaaaaaaaaaaaaaaaaaaaaaaaaaaaaaaaaaaaaaaaugcaucccccccccccccccccccccccccccccccaaaggcucuuuucagagccaccagaauu

SEQ ID NO: 2109 - RNA, 2398 nt, Artificial Sequence
  mRNA product Design a-4 comprising derived and/or modified sequence from YFV__NC_002031.1__X-SS-prMEdelstem_TM-JEV (polyprotein: aa92-681) (opt3)
gggagacuccugucgggcggaaguaggaggaguagaguuuaaaaacaguacucuuuuuccgguucgggacguaguugaagcaacgacaagccggauaaccgcucuugagacaggaagcuuaccaugagaggccugagcuccaggaagcggcgcucucacgacgugcucaccguccaguuccuuauccuggggauguuguuaaugacaggagguguuacucuggugcguaaaaaccgauggcuacuccugaauguaacgucagaggaucuuggcaagaccuuuaguguggggacaggaaacugcacuaccaauauucuggaagccaaauacuggugucccgacagcauggaguauaacugcccuaauuuguccccaagagaggaaccggaugacauagauuguuggugcuacggcgucgaaaacgugaggguugcuuaugguaagugugacucugcagggcggucgcgcagaucaaggcgggccaucgaucuccccacacaugagaaucacggacugaaaacccgccaagagaaguggaugacuggccgaaugggcgaaagacagcugcagaagauugagaggugguucgugcggaacccuuucuucgcggucacagcucucaccaucgccuacuuaguggggagcaauaugacgcagcguguaguuauugcacugcuuguguuggccgucggaccagcuuauagugcacauugcaucgguauaacugaccgcgauuuuaucgaaggcgugcacgggggaaccuggguguccgccacacuggagcaagacaaaugugucacuguuauggcucccgauaagccuucucuagacauuagccucgagaccguggccaucgauagaccagcggaaguaaggaaagugugcuacaacgcaguccugacacaugugaagauuaaugacaaaugucccuccaccggcgaggcccaccuugcugaagagaacgaaggugacaaugccugcaagcggacguauucagaucgaggguggggaaacggcuguggccuguucgggaagggaaguaucguugcaugcgcuaaauuuacuugcgccaagagcaugucuuuguucgagguggaccagacaaaaauacaguacgucauucgcgcgcagcuccacgugggugccaagcaagagaauuggaacaccgauaucaaaacucugaaguuugacgcauuauccggcucacaggaaguagaguucauuggguacggaaaagcuacacuggaaugucagguucagaccgccguggauuuuggcaacagcuauaucgcugagauggaaacggagaguuggaucgucgacagacaaugggcccaggaucucacccuuccuuggcagucugguuccgggggcguguggagggagaugcaucaccuggucgaauuugagccaccgcaugcagccacaauucggguguuggcucuaggaaaucaagaaggcagccugaagacugcgcucaccggggcaaugcgcguuacaaaggacacuaacgauaauaaccuguacaaacuucacggaggucacgugucgugcagaguaaagcugucugccuugacccucaaaggcacauccuauaagauauguaccgacaaaauguuuuucgucaagaaucccacugauacggggcauggaacagugguuaugcaagugaaggucucaaaaggcgcuccuugcaggaucccagugauuguagccgacgaccugaccgcagccaucaacaaggguauauuagugacuguuaaucccauugcuaguaccaacgaugacgagguccugaucgaagugaauccuccauucggggauagcuacaucauugugggccguggagacucccggcuaacauaucaguggcacaaagagggcucuagcaucggcagcacccuggggaaggccuucuccacaacucucaaaggagcucagagacuugcagcccugggugacacggcgugggauuuuggcucuaucgggggaguguucaacucaauuggcagggcuguccaccaaguuuuugguggggccuuccggaccuuguuuggaggcaugaguuggauaacacagggcuuaaugggggcacugcuacucuggaugggagugaaugcccgcgaccgaagcaucgcucuggcauuccuugccacugguggcguacugguguuuuuggcuaccaacguccaugccugaggacuagucccuguucccagagcccacuuuuuuuucuuuuuuugaaauaaaauagccugucuuucagaucuaaaaaaaaaaaaaaaaaaaaaaaaaaaaaaaaaaaaaaaaaaaaaaaaaaaaaaaaaaaaaaaaugcaucccccccccccccccccccccccccccccccaaaggcucuuuucagagccaccagaauu

SEQ ID NO: 2110 - RNA, 2371 nt, Artificial Sequence
  mRNA product Design a-4 comprising derived and/or modified sequence from YFV__NC_002031.1__SSjev(V3)-prMEdelstem_TM-JEV (polyprotein: aa122-681) (opt3)
gggagacuccugucgggcggaaguaggaggaguagaguuuaaaaacaguacucuuuuuccgguucgggacguaguugaagcaacgacaagccggauaaccgcucuugagacaggaagcuuaccaugaacgagggcagcaucauguggcuggccucccucgcuguggucauugcaugcgccggggcgguuacucuggugcguaaaaaccgauggcuacuccugaauguaacgucagaggaucuuggcaagaccuuuaguguggggacaggaaacugcacuaccaauauucuggaagccaaauacuggugucccgacagcauggaguauaacugcccuaauuuguccccaagagaggaaccggaugacauagauuguuggugcuacggcgucgaaaacgugaggguugcuuaugguaagugugacucugcagggcggucgcgcagaucaaggcgggccaucgaucuccccacacaugagaaucacggacugaaaacccgccaagagaaguggaugacuggccgaaugggcgaaagacagcugcagaagauugagaggugguucgugcggaacccuuucuucgcggucacagcucucaccaucgccuacuuaguggggagcaauaugacgcagcguguaguuauugcacugcuuguguuggccgucggaccagcuuauagugcacauugcaucgguauaacugaccgcgauuuuaucgaaggcgugcacgggggaaccuggguguccgccacacuggagcaagacaaaugugucacuguuauggcucccgauaagccuucucuagacauuagccucgagaccguggccaucgauagaccagcggaaguaaggaaagugugcuacaacgcaguccugacacaugugaagauuaaugacaaaugucccuccaccggcgaggcccaccuugcugaagagaacgaaggugacaaugccugcaagcggacguauucagaucgaggguggggaaacggcuguggccuguucgggaagggaaguaucguugcaugcgcuaaauuuacuugcgccaagagcaugucuuuguucgagguggaccagacaaaaauacaguacgucauucgcgcgcagcuccacgugggugccaagcaagagaauuggaacaccgauaucaaaacucugaaguuugacgcauuauccggcucacaggaaguagaguucauuggguacggaaaagcuacacuggaaugucagguucagaccgccguggauuuuggcaacagcuauaucgcugagauggaaacggagaguuggaucgucgacagacaaugggcccaggaucucacccuuccuuggcagucugguuccgggggcguguggagggagaugcaucaccuggucgaauuugagccaccgcaugcagccacaauucggguguuggcucuaggaaaucaagaaggcagccugaagacugcgcucaccggggcaaugcgcguuacaaaggacacuaacgauaauaaccuguacaaacuucacggaggucacgugucgugcagaguaaagcugucugccuugacccucaaaggcacauccuauaagauauguaccgacaaaauguuuuucgucaagaaucccacugauacggggcauggaacagugguuaugcaagugaaggucucaaaaggcgcuccuugcaggaucccagugauuguagccgacgaccugaccgcagccaucaacaaggguauauuagugacuguuaaucccauugcuaguaccaacgaugacgagguccugaucgaagugaauccuccauucggggauagcuacaucauugugggccguggagacucccggcuaacauaucaguggcacaaagagggcucuagcaucggcagcacccuggggaaggccuucuccacaacucucaaaggagcucagagacuugcagcccugggugacacggcgugggauuuuggcucuaucgggggaguguucaacucaauuggcagggcuguccaccaaguuuuugguggggccuuccggaccuuguuuggaggcaugaguuggauaacacagggcuuaaugggggcacugcuacucuggaugggagugaaugcccgcgaccgaagcaucgcucuggcauuccuugccacugguggcguacugguguuuuuggcuaccaacguccaugccugaggacuagucccuguucccagagcccacuuuuuuuucuuuuuuugaaauaaaauagccugucuuucagaucuaaaaaaaaaaaaaaaaaaaaaaaaaaaaaaaaaaaaaaaaaaaaaaaaaaaaaaaaaaaaaaaaugcaucccccccccccccccccccccccccccccccaaaggcucuuuucagagccaccagaauu

SEQ ID NO: 2111 - RNA, 2386 nt, Artificial Sequence
  mRNA product Design a-4 comprising derived and/or modified sequence from YFV__NC_002031.1__X-SS-prME (polyprotein: aa92-778) (opt3)
gggagacuccugucgggcggaaguaggaggaguagaguuuaaaaacaguacucuuuuuccgguucgggacguaguugaagcaacgacaagccggauaaccgcucuugagacaggaagcuuaccaugagaggccugagcuccaggaagcggcgcucucacgacgugcucaccguccaguuccuuauccuggggauguuguuaaugacaggagguguuacucuggugcguaaaaaccgauggcuacuccugaauguaacgucagaggaucuuggcaagaccuuuaguguggggacaggaaacugcacuaccaauauucuggaagccaaauacuggugucccgacagcauggaguauaacugcccuaauuuguccccaagagaggaaccggaugacauagauuguuggugcuacggcgucgaaaacgugaggguugcuuaugguaagugugacucugcagggcggucgcgcagaucaaggcgggccaucgaucuccccacacaugagaaucacggacugaaaacccgccaagagaaguggaugacuggccgaaugggcgaaagacagcugcagaagauugagaggugguucgugcggaacccuuucuucgcggucacagcucucaccaucgccuacuuaguggggagcaauaugacgcagcguguaguuauugcacugcuuguguuggccgucggaccagcuuauagugcacauugcaucgguauaacugaccgcgauuuuaucgaaggcgugcacgggggaaccuggguguccgccacacuggagcaagacaaaugugucacuguuauggcucccgauaagccuucucuagacauuagccucgagaccguggccaucgauagaccagcggaaguaaggaaagugugcuacaacgcaguccugacacaugugaagauuaaugacaaaugucccuccaccggcgaggcccaccuugcugaagagaacgaaggugacaaugccugcaagcggacguauucagaucgaggguggggaaacggcuguggccuguucgggaagggaaguaucguugcaugcgcuaaauuuacuugcgccaagagcaugucuuuguucgagguggaccagacaaaaauacaguacgucauucgcgcgcagcuccacgugggugccaagcaagagaauuggaacaccgauaucaaaacucugaaguuugacgcauuauccggcucacaggaaguagaguucauuggguacggaaaagcuacacuggaaugucagguucagaccgccguggauuuuggcaacagcuauaucgcugagauggaaacggagaguuggaucgucgacagacaaugggcccaggaucucacccuuccuuggcagucugguuccgggggcguguggagggagaugcaucaccuggucgaauuugagccaccgcaugcagccacaauucggguguuggcucuaggaaaucaagaaggcagccugaagacugcgcucaccggggcaaugcgcguuacaaaggacacuaacgauaauaaccuguacaaacuucacggaggucacgugucgugcagaguaaagcugucugccuugacccucaaaggcacauccuauaagauauguaccgacaaaauguuuuucgucaagaaucccacugauacggggcauggaacagugguuaugcaagugaaggucucaaaaggcgcuccuugcaggaucccagugauuguagccgacgaccugaccgcagccaucaacaaggguauauuagugacuguuaaucccauugcuaguaccaacgaugacgagguccugaucgaagugaauccuccauucggggauagcuacaucauugugggccguggagacucccggcuaacauaucaguggcacaaagagggcucuagcaucgggaagcucuuuacccagacuaugaaaggagucgagcgacuggccguuaugggugauacagcaugggacuucucaagugcgggcggguuuuucacguccgugggaaagggcauucauaccguguuugguagcgcuuuccaggggcuuuuuggcggauugaacuggauaacuaagguaaucaugggcgccguccugauuuggguggggaucaauacaagaaacaugaccaugucuaugucaaugauccucguuggagugauuaugauguuccugagucuuggcgucggugcaugaggacuagucccuguucccagagcccacuuuuuuuucuuuuuuugaaauaaaauagccugucuuucagaucuaaaaaaaaaaaaaaaaaaaaaaaaaaaaaaaaaaaaaaaaaaaaaaaaaaaaaaaaaaaaaaaaugcaucccccccccccccccccccccccccccccccaaaggcucuuuucagagccaccagaauu

SEQ ID NO: 2112 - RNA, 2389 nt, Artificial Sequence
  mRNA product Design a-4 comprising derived and/or modified sequence from YFV__NC_002031.1__SSjev(V3)-prME-XX (polyprotein: aa122-788) (opt3)
gggagacuccugucgggcggaaguaggaggaguagaguuuaaaaacaguacucuuuuuccgguucgggacguaguugaagcaacgacaagccggauaaccgcucuugagacaggaagcuuaccaugaacgagggcagcaucauguggcuggccucccucgcuguggucauugcaugcgccggggcgguuacucuggugcguaaaaaccgauggcuacuccugaauguaacgucagaggaucuuggcaagaccuuuaguguggggacaggaaacugcacuaccaauauucuggaagccaaauacuggugucccgacagcauggaguauaacugcccuaauuuguccccaagagaggaaccggaugacauagauuguuggugcuacggcgucgaaaacgugaggguugcuuaugguaagugugacucugcagggcggucgcgcagaucaaggcgggccaucgaucuccccacacaugagaaucacggacugaaaacccgccaagagaaguggaugacuggccgaaugggcgaaagacagcugcagaagauugagaggugguucgugcggaacccuuucuucgcggucacagcucucaccaucgccuacuuaguggggagcaauaugacgcagcguguaguuauugcacugcuuguguuggccgucggaccagcuuauagugcacauugcaucgguauaacugaccgcgauuuuaucgaaggcgugcacgggggaaccuggguguccgccacacuggagcaagacaaaugugucacuguuauggcucccgauaagccuucucuagacauuagccucgagaccguggccaucgauagaccagcggaaguaaggaaagugugcuacaacgcaguccugacacaugugaagauuaaugacaaaugucccuccaccggcgaggcccaccuugcugaagagaacgaaggugacaaugccugcaagcggacguauucagaucgaggguggggaaacggcuguggccuguucgggaagggaaguaucguugcaugcgcuaaauuuacuugcgccaagagcaugucuuuguucgagguggaccagacaaaaauacaguacgucauucgcgcgcagcuccacgugggugccaagcaagagaauuggaacaccgauaucaaaacucugaaguuugacgcauuauccggcucacaggaaguagaguucauuggguacggaaaagcuacacuggaaugucagguucagaccgccguggauuuuggcaacagcuauaucgcugagauggaaacggagaguuggaucgucgacagacaaugggcccaggaucucacccuuccuuggcagucugguuccgggggcguguggagggagaugcaucaccuggucgaauuugagccaccgcaugcagccacaauucggguguuggcucuaggaaaucaagaaggcagccugaagacugcgcucaccggggcaaugcgcguuacaaaggacacuaacgauaauaaccuguacaaacuucacggaggucacgugucgugcagaguaaagcugucugccuugacccucaaaggcacauccuauaagauauguaccgacaaaauguuuuucgucaagaaucccacugauacggggcauggaacagugguuaugcaagugaaggucucaaaaggcgcuccuugcaggaucccagugauuguagccgacgaccugaccgcagccaucaacaaggguauauuagugacuguuaaucccauugcuaguaccaacgaugacgagguccugaucgaagugaauccuccauucggggauagcuacaucauugugggccguggagacucccggcuaacauaucaguggcacaaagagggcucuagcaucgggaagcucuuuacccagacuaugaaaggagucgagcgacuggccguuaugggugauacagcaugggacuucucaagugcgggcggguuuuucacguccgugggaaagggcauucauaccguguuugguagcgcuuuccaggggcuuuuuggcggauugaacuggauaacuaagguaaucaugggcgccguccugauuuggguggggaucaauacaagaaacaugaccaugucuaugucaaugauccucguuggagugauuaugauguuccugagucuuggcgucggugcagaucaggggugugccauaaauuuuggaaaaugaggacuagucccuguucccagagcccacuuuuuuuucuuuuuuugaaauaaaauagccugucuuucagaucuaaaaaaaaaaaaaaaaaaaaaaaaaaaaaaaaaaaaaaaaaaaaaaaaaaaaaaaaaaaaaaaaugcaucccccccccccccccccccccccccccccccaaaggcucuuuucagagccaccagaauu

SEQ ID NO: 2113 - RNA, 2398 nt, Artificial Sequence
  mRNA product Design a-4 comprising derived and/or modified sequence from YFV__NC_002031.1__X-SS-prMEdelstem_TM-JEV (polyprotein: aa92-681) (opt4)
gggagacuccugucgggcggaaguaggaggaguagaguuuaaaaacaguacucuuuuuccgguucgggacguaguugaagcaacgacaagccggauaaccgcucuugagacaggaagcuuaccaugagaggccugagcagcagaaagagaagaagccacgacgugcugaccgugcaguuccugauccugggcaugcugcugaugaccggcggcgugacccuggugagaaagaacagauggcugcugcugaacgugaccagcgaggaccugggcaagaccuucagcgugggcaccggcaacugcaccaccaacauccuggaggccaaguacuggugccccgacagcauggaguacaacugccccaaccugagccccagagaggagcccgacgacaucgacugcuggugcuacggcguggagaacgugagaguggccuacggcaagugcgacagcgccggcagaagcagaagaagcagaagagccaucgaccugcccacccacgagaaccacggccugaagaccagacaggagaaguggaugaccggcagaaugggcgagagacagcugcagaagaucgagagaugguucgugagaaaccccuucuucgccgugaccgcccugaccaucgccuaccuggugggcagcaacaugacccagagaguggugaucgcccugcuggugcuggccgugggccccgccuacagcgcccacugcaucggcaucaccgacagagacuucaucgagggcgugcacggcggcaccugggugagcgccacccuggagcaggacaagugcgugaccgugauggcccccgacaagcccagccuggacaucagccuggagaccguggccaucgacagacccgccgaggugagaaaggugugcuacaacgccgugcugacccacgugaagaucaacgacaagugccccagcaccggcgaggcccaccuggccgaggagaacgagggcgacaacgccugcaagagaaccuacagcgacagaggcuggggcaacggcugcggccuguucggcaagggcagcaucguggccugcgccaaguucaccugcgccaagagcaugagccuguucgagguggaccagaccaagauccaguacgugaucagagcccagcugcacgugggcgccaagcaggagaacuggaacaccgacaucaagacccugaaguucgacgcccugagcggcagccaggagguggaguucaucggcuacggcaaggccacccuggagugccaggugcagaccgccguggacuucggcaacagcuacaucgccgagauggagaccgagagcuggaucguggacagacagugggcccaggaccugacccugcccuggcagagcggcagcggcggcguguggagagagaugcaccaccugguggaguucgagcccccccacgccgccaccaucagagugcuggcccugggcaaccaggagggcagccugaagaccgcccugaccggcgccaugagagugaccaaggacaccaacgacaacaaccuguacaagcugcacggcggccacgugagcugcagagugaagcugagcgcccugacccugaagggcaccagcuacaagaucugcaccgacaagauguucuucgugaagaaccccaccgacaccggccacggcaccguggugaugcaggugaaggugagcaagggcgcccccugcagaauccccgugaucguggccgacgaccugaccgccgccaucaacaagggcauccuggugaccgugaaccccaucgccagcaccaacgacgacgaggugcugaucgaggugaacccccccuucggcgacagcuacaucaucgugggcagaggcgacagcagacugaccuaccaguggcacaaggagggcagcagcaucggcagcacccugggcaaggccuucagcaccacccugaagggcgcccagagacuggccgcccugggcgacaccgccugggacuucggcagcaucggcggcguguucaacagcaucggcagagccgugcaccagguguucggcggcgccuucagaacccuguucggcggcaugagcuggaucacccagggccugaugggcgcccugcugcuguggaugggcgugaacgccagagacagaagcaucgcccuggccuuccuggccaccggcggcgugcugguguuccuggccaccaacgugcacgccugaggacuagucccuguucccagagcccacuuuuuuuucuuuuuuugaaauaaaauagccugucuuucagaucuaaaaaaaaaaaaaaaaaaaaaaaaaaaaaaaaaaaaaaaaaaaaaaaaaaaaaaaaaaaaaaaaugcaucccccccccccccccccccccccccccccccaaaggcucuuuucagagccaccagaauu

SEQ ID NO: 2114 - RNA, 2371 nt, Artificial Sequence
  mRNA product Design a-4 comprising derived and/or modified sequence from YFV__NC_002031.1__SSjev(V3)-prMEdelstem_TM-JEV (polyprotein: aa122-681) (opt4)
gggagacuccugucgggcggaaguaggaggaguagaguuuaaaaacaguacucuuuuuccgguucgggacguaguugaagcaacgacaagccggauaaccgcucuugagacaggaagcuuaccaugaacgagggcagcaucauguggcuggccagccuggccguggugaucgccugcgccggcgccgugacccuggugagaaagaacagauggcugcugcugaacgugaccagcgaggaccugggcaagaccuucagcgugggcaccggcaacugcaccaccaacauccuggaggccaaguacuggugccccgacagcauggaguacaacugccccaaccugagccccagagaggagcccgacgacaucgacugcuggugcuacggcguggagaacgugagaguggccuacggcaagugcgacagcgccggcagaagcagaagaagcagaagagccaucgaccugcccacccacgagaaccacggccugaagaccagacaggagaaguggaugaccggcagaaugggcgagagacagcugcagaagaucgagagaugguucgugagaaaccccuucuucgccgugaccgcccugaccaucgccuaccuggugggcagcaacaugacccagagaguggugaucgcccugcuggugcuggccgugggccccgccuacagcgcccacugcaucggcaucaccgacagagacuucaucgagggcgugcacggcggcaccugggugagcgccacccuggagcaggacaagugcgugaccgugauggcccccgacaagcccagccuggacaucagccuggagaccguggccaucgacagacccgccgaggugagaaaggugugcuacaacgccgugcugacccacgugaagaucaacgacaagugccccagcaccggcgaggcccaccuggccgaggagaacgagggcgacaacgccugcaagagaaccuacagcgacagaggcuggggcaacggcugcggccuguucggcaagggcagcaucguggccugcgccaaguucaccugcgccaagagcaugagccuguucgagguggaccagaccaagauccaguacgugaucagagcccagcugcacgugggcgccaagcaggagaacuggaacaccgacaucaagacccugaaguucgacgcccugagcggcagccaggagguggaguucaucggcuacggcaaggccacccuggagugccaggugcagaccgccguggacuucggcaacagcuacaucgccgagauggagaccgagagcuggaucguggacagacagugggcccaggaccugacccugcccuggcagagcggcagcggcggcguguggagagagaugcaccaccugguggaguucgagcccccccacgccgccaccaucagagugcuggcccugggcaaccaggagggcagccugaagaccgcccugaccggcgccaugagagugaccaaggacaccaacgacaacaaccuguacaagcugcacggcggccacgugagcugcagagugaagcugagcgcccugacccugaagggcaccagcuacaagaucugcaccgacaagauguucuucgugaagaaccccaccgacaccggccacggcaccguggugaugcaggugaaggugagcaagggcgcccccugcagaauccccgugaucguggccgacgaccugaccgccgccaucaacaagggcauccuggugaccgugaaccccaucgccagcaccaacgacgacgaggugcugaucgaggugaacccccccuucggcgacagcuacaucaucgugggcagaggcgacagcagacugaccuaccaguggcacaaggagggcagcagcaucggcagcacccugggcaaggccuucagcaccacccugaagggcgcccagagacuggccgcccugggcgacaccgccugggacuucggcagcaucggcggcguguucaacagcaucggcagagccgugcaccagguguucggcggcgccuucagaacccuguucggcggcaugagcuggaucacccagggccugaugggcgcccugcugcuguggaugggcgugaacgccagagacagaagcaucgcccuggccuuccuggccaccggcggcgugcugguguuccuggccaccaacgugcacgccugaggacuagucccuguucccagagcccacuuuuuuuucuuuuuuugaaauaaaauagccugucuuucagaucuaaaaaaaaaaaaaaaaaaaaaaaaaaaaaaaaaaaaaaaaaaaaaaaaaaaaaaaaaaaaaaaaugcaucccccccccccccccccccccccccccccccaaaggcucuuuucagagccaccagaauu

SEQ ID NO: 2115 - RNA, 2386 nt, Artificial Sequence
  mRNA product Design a-4 comprising derived and/or modified sequence from YFV__NC_002031.1__X-SS-prME (polyprotein: aa92-778) (opt4)
gggagacuccugucgggcggaaguaggaggaguagaguuuaaaaacaguacucuuuuuccgguucgggacguaguugaagcaacgacaagccggauaaccgcucuugagacaggaagcuuaccaugagaggccugagcagcagaaagagaagaagccacgacgugcugaccgugcaguuccugauccugggcaugcugcugaugaccggcggcgugacccuggugagaaagaacagauggcugcugcugaacgugaccagcgaggaccugggcaagaccuucagcgugggcaccggcaacugcaccaccaacauccuggaggccaaguacuggugccccgacagcauggaguacaacugccccaaccugagccccagagaggagcccgacgacaucgacugcuggugcuacggcguggagaacgugagaguggccuacggcaagugcgacagcgccggcagaagcagaagaagcagaagagccaucgaccugcccacccacgagaaccacggccugaagaccagacaggagaaguggaugaccggcagaaugggcgagagacagcugcagaagaucgagagaugguucgugagaaaccccuucuucgccgugaccgcccugaccaucgccuaccuggugggcagcaacaugacccagagaguggugaucgcccugcuggugcuggccgugggccccgccuacagcgcccacugcaucggcaucaccgacagagacuucaucgagggcgugcacggcggcaccugggugagcgccacccuggagcaggacaagugcgugaccgugauggcccccgacaagcccagccuggacaucagccuggagaccguggccaucgacagacccgccgaggugagaaaggugugcuacaacgccgugcugacccacgugaagaucaacgacaagugccccagcaccggcgaggcccaccuggccgaggagaacgagggcgacaacgccugcaagagaaccuacagcgacagaggcuggggcaacggcugcggccuguucggcaagggcagcaucguggccugcgccaaguucaccugcgccaagagcaugagccuguucgagguggaccagaccaagauccaguacgugaucagagcccagcugcacgugggcgccaagcaggagaacuggaacaccgacaucaagacccugaaguucgacgcccugagcggcagccaggagguggaguucaucggcuacggcaaggccacccuggagugccaggugcagaccgccguggacuucggcaacagcuacaucgccgagauggagaccgagagcuggaucguggacagacagugggcccaggaccugacccugcccuggcagagcggcagcggcggcguguggagagagaugcaccaccugguggaguucgagcccccccacgccgccaccaucagagugcuggcccugggcaaccaggagggcagccugaagaccgcccugaccggcgccaugagagugaccaaggacaccaacgacaacaaccuguacaagcugcacggcggccacgugagcugcagagugaagcugagcgcccugacccugaagggcaccagcuacaagaucugcaccgacaagauguucuucgugaagaaccccaccgacaccggccacggcaccguggugaugcaggugaaggugagcaagggcgcccccugcagaauccccgugaucguggccgacgaccugaccgccgccaucaacaagggcauccuggugaccgugaaccccaucgccagcaccaacgacgacgaggugcugaucgaggugaacccccccuucggcgacagcuacaucaucgugggcagaggcgacagcagacugaccuaccaguggcacaaggagggcagcagcaucggcaagcuguucacccagaccaugaagggcguggagagacuggccgugaugggcgacaccgccugggacuucagcagcgccggcggcuucuucaccagcgugggcaagggcauccacaccguguucggcagcgccuuccagggccuguucggcggccugaacuggaucaccaaggugaucaugggcgccgugcugaucugggugggcaucaacaccagaaacaugaccaugagcaugagcaugauccuggugggcgugaucaugauguuccugagccugggcgugggcgccugaggacuagucccuguucccagagcccacuuuuuuuucuuuuuuugaaauaaaauagccugucuuucagaucuaaaaaaaaaaaaaaaaaaaaaaaaaaaaaaaaaaaaaaaaaaaaaaaaaaaaaaaaaaaaaaaaugcaucccccccccccccccccccccccccccccccaaaggcucuuuucagagccaccagaauu

SEQ ID NO: 2116 - RNA, 2389 nt, Artificial Sequence
  mRNA product Design a-4 comprising derived and/or modified sequence from YFV__NC_002031.1__SSjev(V3)-prME-XX (polyprotein: aa122-788) (opt4)
gggagacuccugucgggcggaaguaggaggaguagaguuuaaaaacaguacucuuuuuccgguucgggacguaguugaagcaacgacaagccggauaaccgcucuugagacaggaagcuuaccaugaacgagggcagcaucauguggcuggccagccuggccguggugaucgccugcgccggcgccgugacccuggugagaaagaacagauggcugcugcugaacgugaccagcgaggaccugggcaagaccuucagcgugggcaccggcaacugcaccaccaacauccuggaggccaaguacuggugccccgacagcauggaguacaacugccccaaccugagccccagagaggagcccgacgacaucgacugcuggugcuacggcguggagaacgugagaguggccuacggcaagugcgacagcgccggcagaagcagaagaagcagaagagccaucgaccugcccacccacgagaaccacggccugaagaccagacaggagaaguggaugaccggcagaaugggcgagagacagcugcagaagaucgagagaugguucgugagaaaccccuucuucgccgugaccgcccugaccaucgccuaccuggugggcagcaacaugacccagagaguggugaucgcccugcuggugcuggccgugggccccgccuacagcgcccacugcaucggcaucaccgacagagacuucaucgagggcgugcacggcggcaccugggugagcgccacccuggagcaggacaagugcgugaccgugauggcccccgacaagcccagccuggacaucagccuggagaccguggccaucgacagacccgccgaggugagaaaggugugcuacaacgccgugcugacccacgugaagaucaacgacaagugccccagcaccggcgaggcccaccuggccgaggagaacgagggcgacaacgccugcaagagaaccuacagcgacagaggcuggggcaacggcugcggccuguucggcaagggcagcaucguggccugcgccaaguucaccugcgccaagagcaugagccuguucgagguggaccagaccaagauccaguacgugaucagagcccagcugcacgugggcgccaagcaggagaacuggaacaccgacaucaagacccugaaguucgacgcccugagcggcagccaggagguggaguucaucggcuacggcaaggccacccuggagugccaggugcagaccgccguggacuucggcaacagcuacaucgccgagauggagaccgagagcuggaucguggacagacagugggcccaggaccugacccugcccuggcagagcggcagcggcggcguguggagagagaugcaccaccugguggaguucgagcccccccacgccgccaccaucagagugcuggcccugggcaaccaggagggcagccugaagaccgcccugaccggcgccaugagagugaccaaggacaccaacgacaacaaccuguacaagcugcacggcggccacgugagcugcagagugaagcugagcgcccugacccugaagggcaccagcuacaagaucugcaccgacaagauguucuucgugaagaaccccaccgacaccggccacggcaccguggugaugcaggugaaggugagcaagggcgcccccugcagaauccccgugaucguggccgacgaccugaccgccgccaucaacaagggcauccuggugaccgugaaccccaucgccagcaccaacgacgacgaggugcugaucgaggugaacccccccuucggcgacagcuacaucaucgugggcagaggcgacagcagacugaccuaccaguggcacaaggagggcagcagcaucggcaagcuguucacccagaccaugaagggcguggagagacuggccgugaugggcgacaccgccugggacuucagcagcgccggcggcuucuucaccagcgugggcaagggcauccacaccguguucggcagcgccuuccagggccuguucggcggccugaacuggaucaccaaggugaucaugggcgccgugcugaucugggugggcaucaacaccagaaacaugaccaugagcaugagcaugauccuggugggcgugaucaugauguuccugagccugggcgugggcgccgaccagggcugcgccaucaacuucggcaagugaggacuagucccuguucccagagcccacuuuuuuuucuuuuuuugaaauaaaauagccugucuuucagaucuaaaaaaaaaaaaaaaaaaaaaaaaaaaaaaaaaaaaaaaaaaaaaaaaaaaaaaaaaaaaaaaaugcaucccccccccccccccccccccccccccccccaaaggcucuuuucagagccaccagaauu

SEQ ID NO: 2117 - RNA, 2398 nt, Artificial Sequence
  mRNA product Design a-4 comprising derived and/or modified sequence from YFV__NC_002031.1__X-SS-prMEdelstem_TM-JEV (polyprotein: aa92-681) (opt5)
gggagacuccugucgggcggaaguaggaggaguagaguuuaaaaacaguacucuuuuuccgguucgggacguaguugaagcaacgacaagccggauaaccgcucuugagacaggaagcuuaccaugagaggccugagcucccggaagcgcagaucucacgacgugcucaccguccaguuccugauccuugggaugcugcucaugacaggaggcguuacgcuggugcggaaaaaccgcuggcuucugcucaaugugaccagcgaggaucuggggaagacauuuuccgucggaaccggcaacugcacaaccaauauucuggaagccaaauacuggugucccgacucuauggaguauaacugcccuaaucucagcccgagagaagaacccgaugacaucgauuguuggugcuacgggguggaaaacguucggguggcuuauggaaagugugacuccgccggccgcucuagacggagccgcagagcgauugaucugccuacacaugagaaucacggccuuaaaacccggcaagagaaguggaugacggggcgcaugggagaaagacagcugcagaagaucgagcggugguucguccgcaaccccuuuuucgcugugaccgcccucacaauugccuaccugguuggcuccaauaugacccagagaguggucaucgcccuucuggugcucgcuguggggccugcuuauagcgcccauugcaucggaauuacagaccgggauuuuaucgaaggcguccacgggggaaccuggguuucugcgacgcuggagcaagacaaaugugugacagugauggcccccgauaagccuucccuggacauuagccucgagaccgucgcuaucgauagaccggccgaagugcgcaaaguuugcuacaacgcugugcugacacaugucaagauuaaugacaaaugucccucuaccggcgaggcccaccuugcggaagagaacgaaggcgacaaugccugcaagcggaccuauuccgauagaggguggggaaacggcugugggcuguucggaaagggcagcaucguggcuugcgccaaauuuacaugcgcuaagucuaugucccucuucgagguugaccagacgaaaauucaguacgugauccgcgcccagcugcacgucggggccaagcaagagaauuggaacaccgauaucaaaacacuuaaguuugacgcucugagcggaucccaggaaguggaguucauuggcuacggcaaagcgacccucgaaugucagguccagacagccguggauuuugggaacucuuauaucgcugagauggaaaccgagagcuggauuguugaccggcaaugggcccaggaucugacgcugccuuggcaguccggaagcggcgggguguggagagagaugcaucaccucgucgaguucgagcccccucaugccgcuacaauccgcgugcuggcccuuggaaaucaagaaggcucucugaagaccgcgcucaccggggcuaugcggguuacaaaggacaccaacgauaauaaccuguacaaacuucacggcggacacguguccugcagagucaagcugagcgcccucacacugaaaggcacgucuuauaagauuuguaccgacaaaauguuuuucgugaagaaucccacagauaccgggcauggaacagugguuaugcaggucaaggugagcaaaggcgccccgugccgcaucccugugaucgucgcugacgaccugaccgccgcuauuaacaaggggauccucgugacgguuaaucccauugccuccaccaacgaugacgaggugcugaucgaagucaauccucccuucggagauucuuacauuaucgugggccggggagacagcagacuuacauaucaguggcacaaagagggcuccagcaucggcagcacccuggggaaggccuucuccacaacgcucaaaggagcucagagacuggccgcgcuuggcgacaccgcuugggauuuugggucuaucggaggcguguucaacagcauugggcgggccguccaccaaguuuuuggaggcgccuuccgcacacuguuuggcgggauguccuggaucacccagggacucaugggcgcucugcuucuguggaugggggugaaugccagagaccggucuauugcucucgccuuccuggcgacaggaggcgugcuggucuuucucgccaccaacgugcaugcuugaggacuagucccuguucccagagcccacuuuuuuuucuuuuuuugaaauaaaauagccugucuuucagaucuaaaaaaaaaaaaaaaaaaaaaaaaaaaaaaaaaaaaaaaaaaaaaaaaaaaaaaaaaaaaaaaaugcaucccccccccccccccccccccccccccccccaaaggcucuuuucagagccaccagaauu

SEQ ID NO: 2118 - RNA, 2371 nt, Artificial Sequence
  mRNA product Design a-4 comprising derived and/or modified sequence from YFV__NC_002031.1__SSjev(V3)-prMEdelstem_TM-JEV (polyprotein: aa122-681) (opt5)
gggagacuccugucgggcggaaguaggaggaguagaguuuaaaaacaguacucuuuuuccgguucgggacguaguugaagcaacgacaagccggauaaccgcucuugagacaggaagcuuaccaugaacgagggcagcaucauguggcuggccucccucgcuguggucauugccugcgcgggggcuguuacgcuggugcggaaaaaccgcuggcuucugcucaaugugaccagcgaggaucuggggaagacauuuuccgucggaaccggcaacugcacaaccaauauucuggaagccaaauacuggugucccgacucuauggaguauaacugcccuaaucucagcccgagagaagaacccgaugacaucgauuguuggugcuacgggguggaaaacguucggguggcuuauggaaagugugacuccgccggccgcucuagacggagccgcagagcgauugaucugccuacacaugagaaucacggccuuaaaacccggcaagagaaguggaugacggggcgcaugggagaaagacagcugcagaagaucgagcggugguucguccgcaaccccuuuuucgcugugaccgcccucacaauugccuaccugguuggcuccaauaugacccagagaguggucaucgcccuucuggugcucgcuguggggccugcuuauagcgcccauugcaucggaauuacagaccgggauuuuaucgaaggcguccacgggggaaccuggguuucugcgacgcuggagcaagacaaaugugugacagugauggcccccgauaagccuucccuggacauuagccucgagaccgucgcuaucgauagaccggccgaagugcgcaaaguuugcuacaacgcugugcugacacaugucaagauuaaugacaaaugucccucuaccggcgaggcccaccuugcggaagagaacgaaggcgacaaugccugcaagcggaccuauuccgauagaggguggggaaacggcugugggcuguucggaaagggcagcaucguggcuugcgccaaauuuacaugcgcuaagucuaugucccucuucgagguugaccagacgaaaauucaguacgugauccgcgcccagcugcacgucggggccaagcaagagaauuggaacaccgauaucaaaacacuuaaguuugacgcucugagcggaucccaggaaguggaguucauuggcuacggcaaagcgacccucgaaugucagguccagacagccguggauuuugggaacucuuauaucgcugagauggaaaccgagagcuggauuguugaccggcaaugggcccaggaucugacgcugccuuggcaguccggaagcggcgggguguggagagagaugcaucaccucgucgaguucgagcccccucaugccgcuacaauccgcgugcuggcccuuggaaaucaagaaggcucucugaagaccgcgcucaccggggcuaugcggguuacaaaggacaccaacgauaauaaccuguacaaacuucacggcggacacguguccugcagagucaagcugagcgcccucacacugaaaggcacgucuuauaagauuuguaccgacaaaauguuuuucgugaagaaucccacagauaccgggcauggaacagugguuaugcaggucaaggugagcaaaggcgccccgugccgcaucccugugaucgucgcugacgaccugaccgccgcuauuaacaaggggauccucgugacgguuaaucccauugccuccaccaacgaugacgaggugcugaucgaagucaauccucccuucggagauucuuacauuaucgugggccggggagacagcagacuuacauaucaguggcacaaagagggcuccagcaucggcagcacccuggggaaggccuucuccacaacgcucaaaggagcucagagacuggccgcgcuuggcgacaccgcuugggauuuugggucuaucggaggcguguucaacagcauugggcgggccguccaccaaguuuuuggaggcgccuuccgcacacuguuuggcgggauguccuggaucacccagggacucaugggcgcucugcuucuguggaugggggugaaugccagagaccggucuauugcucucgccuuccuggcgacaggaggcgugcuggucuuucucgccaccaacgugcaugcuugaggacuagucccuguucccagagcccacuuuuuuuucuuuuuuugaaauaaaauagccugucuuucagaucuaaaaaaaaaaaaaaaaaaaaaaaaaaaaaaaaaaaaaaaaaaaaaaaaaaaaaaaaaaaaaaaaugcaucccccccccccccccccccccccccccccccaaaggcucuuuucagagccaccagaauu

SEQ ID NO: 2119 - RNA, 2386 nt, Artificial Sequence
  mRNA product Design a-4 comprising derived and/or modified sequence from YFV__NC_002031.1__X-SS-prME (polyprotein: aa92-778) (opt5)
gggagacuccugucgggcggaaguaggaggaguagaguuuaaaaacaguacucuuuuuccgguucgggacguaguugaagcaacgacaagccggauaaccgcucuugagacaggaagcuuaccaugagaggccugagcucccggaagcgcagaucucacgacgugcucaccguccaguuccugauccuugggaugcugcucaugacaggaggcguuacgcuggugcggaaaaaccgcuggcuucugcucaaugugaccagcgaggaucuggggaagacauuuuccgucggaaccggcaacugcacaaccaauauucuggaagccaaauacuggugucccgacucuauggaguauaacugcccuaaucucagcccgagagaagaacccgaugacaucgauuguuggugcuacgggguggaaaacguucggguggcuuauggaaagugugacuccgccggccgcucuagacggagccgcagagcgauugaucugccuacacaugagaaucacggccuuaaaacccggcaagagaaguggaugacggggcgcaugggagaaagacagcugcagaagaucgagcggugguucguccgcaaccccuuuuucgcugugaccgcccucacaauugccuaccugguuggcuccaauaugacccagagaguggucaucgcccuucuggugcucgcuguggggccugcuuauagcgcccauugcaucggaauuacagaccgggauuuuaucgaaggcguccacgggggaaccuggguuucugcgacgcuggagcaagacaaaugugugacagugauggcccccgauaagccuucccuggacauuagccucgagaccgucgcuaucgauagaccggccgaagugcgcaaaguuugcuacaacgcugugcugacacaugucaagauuaaugacaaaugucccucuaccggcgaggcccaccuugcggaagagaacgaaggcgacaaugccugcaagcggaccuauuccgauagaggguggggaaacggcugugggcuguucggaaagggcagcaucguggcuugcgccaaauuuacaugcgcuaagucuaugucccucuucgagguugaccagacgaaaauucaguacgugauccgcgcccagcugcacgucggggccaagcaagagaauuggaacaccgauaucaaaacacuuaaguuugacgcucugagcggaucccaggaaguggaguucauuggcuacggcaaagcgacccucgaaugucagguccagacagccguggauuuugggaacucuuauaucgcugagauggaaaccgagagcuggauuguugaccggcaaugggcccaggaucugacgcugccuuggcaguccggaagcggcgggguguggagagagaugcaucaccucgucgaguucgagcccccucaugccgcuacaauccgcgugcuggcccuuggaaaucaagaaggcucucugaagaccgcgcucaccggggcuaugcggguuacaaaggacaccaacgauaauaaccuguacaaacuucacggcggacacguguccugcagagucaagcugagcgcccucacacugaaaggcacgucuuauaagauuuguaccgacaaaauguuuuucgugaagaaucccacagauaccgggcauggaacagugguuaugcaggucaaggugagcaaaggcgccccgugccgcaucccugugaucgucgcugacgaccugaccgccgcuauuaacaaggggauccucgugacgguuaaucccauugccuccaccaacgaugacgaggugcugaucgaagucaauccucccuucggagauucuuacauuaucgugggccggggagacagcagacuuacauaucaguggcacaaagagggcuccagcaucggaaagcuguuuacccagacaaugaaaggcguugagcgccucgcggugaugggggauaccgccugggacuucucuuccgcuggaggcuuuuucacgagcgucgggaaggggauucauacaguguuuggcucugccuuccaagggcuguuuggcggacugaacuggaucaccaagguuauuaugggcgcugugcuuaucugggucgggauuaauacacggaacaugaccauguccaugagcaugauccucgugggagugauuaugauguuccugucccugggcgucggggccugaggacuagucccuguucccagagcccacuuuuuuuucuuuuuuugaaauaaaauagccugucuuucagaucuaaaaaaaaaaaaaaaaaaaaaaaaaaaaaaaaaaaaaaaaaaaaaaaaaaaaaaaaaaaaaaaaugcaucccccccccccccccccccccccccccccccaaaggcucuuuucagagccaccagaauu

SEQ ID NO: 2120 - RNA, 2389 nt, Artificial Sequence
  mRNA product Design a-4 comprising derived and/or modified sequence from YFV__NC_002031.1__SSjev(V3)-prME-XX (polyprotein: aa122-788) (opt5)
gggagacuccugucgggcggaaguaggaggaguagaguuuaaaaacaguacucuuuuuccgguucgggacguaguugaagcaacgacaagccggauaaccgcucuugagacaggaagcuuaccaugaacgagggcagcaucauguggcuggccucccucgcuguggucauugccugcgcgggggcuguuacgcuggugcggaaaaaccgcuggcuucugcucaaugugaccagcgaggaucuggggaagacauuuuccgucggaaccggcaacugcacaaccaauauucuggaagccaaauacuggugucccgacucuauggaguauaacugcccuaaucucagcccgagagaagaacccgaugacaucgauuguuggugcuacgggguggaaaacguucggguggcuuauggaaagugugacuccgccggccgcucuagacggagccgcagagcgauugaucugccuacacaugagaaucacggccuuaaaacccggcaagagaaguggaugacggggcgcaugggagaaagacagcugcagaagaucgagcggugguucguccgcaaccccuuuuucgcugugaccgcccucacaauugccuaccugguuggcuccaauaugacccagagaguggucaucgcccuucuggugcucgcuguggggccugcuuauagcgcccauugcaucggaauuacagaccgggauuuuaucgaaggcguccacgggggaaccuggguuucugcgacgcuggagcaagacaaaugugugacagugauggcccccgauaagccuucccuggacauuagccucgagaccgucgcuaucgauagaccggccgaagugcgcaaaguuugcuacaacgcugugcugacacaugucaagauuaaugacaaaugucccucuaccggcgaggcccaccuugcggaagagaacgaaggcgacaaugccugcaagcggaccuauuccgauagaggguggggaaacggcugugggcuguucggaaagggcagcaucguggcuugcgccaaauuuacaugcgcuaagucuaugucccucuucgagguugaccagacgaaaauucaguacgugauccgcgcccagcugcacgucggggccaagcaagagaauuggaacaccgauaucaaaacacuuaaguuugacgcucugagcggaucccaggaaguggaguucauuggcuacggcaaagcgacccucgaaugucagguccagacagccguggauuuugggaacucuuauaucgcugagauggaaaccgagagcuggauuguugaccggcaaugggcccaggaucugacgcugccuuggcaguccggaagcggcgggguguggagagagaugcaucaccucgucgaguucgagcccccucaugccgcuacaauccgcgugcuggcccuuggaaaucaagaaggcucucugaagaccgcgcucaccggggcuaugcggguuacaaaggacaccaacgauaauaaccuguacaaacuucacggcggacacguguccugcagagucaagcugagcgcccucacacugaaaggcacgucuuauaagauuuguaccgacaaaauguuuuucgugaagaaucccacagauaccgggcauggaacagugguuaugcaggucaaggugagcaaaggcgccccgugccgcaucccugugaucgucgcugacgaccugaccgccgcuauuaacaaggggauccucgugacgguuaaucccauugccuccaccaacgaugacgaggugcugaucgaagucaauccucccuucggagauucuuacauuaucgugggccggggagacagcagacuuacauaucaguggcacaaagagggcuccagcaucggaaagcuguuuacccagacaaugaaaggcguugagcgccucgcggugaugggggauaccgccugggacuucucuuccgcuggaggcuuuuucacgagcgucgggaaggggauucauacaguguuuggcucugccuuccaagggcuguuuggcggacugaacuggaucaccaagguuauuaugggcgcugugcuuaucugggucgggauuaauacacggaacaugaccauguccaugagcaugauccucgugggagugauuaugauguuccugucccugggcgucggggccgaucagggaugugcgaucaauuuuggcaaaugaggacuagucccuguucccagagcccacuuuuuuuucuuuuuuugaaauaaaauagccugucuuucagaucuaaaaaaaaaaaaaaaaaaaaaaaaaaaaaaaaaaaaaaaaaaaaaaaaaaaaaaaaaaaaaaaaugcaucccccccccccccccccccccccccccccccaaaggcucuuuucagagccaccagaauu

SEQ ID NO: 2121 - RNA, 2398 nt, Artificial Sequence
  mRNA product Design a-4 comprising derived and/or modified sequence from YFV__NC_002031.1__X-SS-prMEdelstem_TM-JEV (polyprotein: aa92-681) (opt6)
gggagacuccugucgggcggaaguaggaggaguagaguuuaaaaacaguacucuuuuuccgguucgggacguaguugaagcaacgacaagccggauaaccgcucuugagacaggaagcuuaccaugagaggauuaucaaguagaaaaagaagaucacaugauguacuaaccgugcaauuuuugaucuuagggaugcucuuaaugacaggagguguuacauuaguaagaaagaaucgauggcugcuuuuaaaugugacaucagaggauuuagggaaaacauuuucgguaggaacaggaaauuguacuacaaauauacuugaagcaaaauauuggugcccagacucuauggaauauaauuguccaaauuuaaguccuagagaagaaccugacgauauagauuguugguguuaugguguagaaaauguaagaguagcauacggcaaaugcgauagugcaggacguucuagacguucaaggagagccauagaucugcccacucacgaaaaucacggauugaaaacacgacaagaaaaauggaugacugggcgaaugggagaaagacaacuacagaaaauugaaagaugguucguuagaaauccauucuuugccguaacagcuuuaacaauagccuauuuaguagguaguaauaugacacaaagaguaguaauagcauugcuaguguuagcaguuggaccagcuuauagugcacauugcauaggaauaacagauagagacuuuauagaaggaguacacgggggaacuuggguaagugccacuuuagaacaagauaaauguguuacagugauggcgccagauaaaccaagucuggacauaaguuuggaaacaguagcgauugauagacccgcagaaguaagaaaaguuuguuauaaugcuguucuaacccauguuaaaauaaaugauaaaugcccuagcaccggagaagcccaucuagcagaagaaaaugaaggagauaacgcauguaaacgaacauacucagauagaggauggggcaacggauguggcuuguuuggaaaagguagcauaguagcaugcgcuaaauuuacaugcgcaaagucaaugucauuauuugaaguagaucaaacaaaaauacaauauguaauaagagcucaauuacacgugggugcaaaacaagaaaauuggaauacagacauaaagacacuaaaguucgacgcauuaaguggaucacaagagguagaauuuauaggguacggaaaagcgacuuuagagugucaaguccaaacagcaguagauuucgguaacucauacauagcagaaauggaaacugaaaguuggauaguagauagacaaugggcacaagacuugacacuaccuuggcaaucaggaagcggaggaguauggagagaaaugcaucauuuaguagaauuugaaccaccucaugcagcaacaauaagaguauuagcccuaggaaaccaagaaggaaguuuaaaaacagcacuaacaggagcuaugagaguaacaaaagauacaaaugacaacaaucuauacaaauuacacggaggacauguaagcugccggguaaaguugagcgcacuaacauuaaaaggaacgaguuauaaaauaugcacagauaaaauguucuuuguuaaaaauccuacagauaccggucauggaacaguaguaaugcaaguaaaaguaaguaaaggcgcucccuguagaauaccuguaauagucgcagacgauuuaaccgcagcaauaaauaaaggaauauuagucacgguaaacccaauagcgucaacaaaugaugaugaaguauuaauagaaguuaacccaccuuuuggagacaguuauauaauagucggaaggggugauaguagacuaacauaccaauggcauaaagaaggaagcucaauaggaaguacacuaggaaaagcauuuaguacaacauuaaaaggagcacaaagauuagcagcauuaggagauacagcaugggauuuuggaagcauaggaggaguauuuaauaguauagguagagcaguacaucaaguauuuggaggagcauuuagaacauuauuuggaggaaugaguuggauaacacaaggauuaaugggagcauuauuauuauggaugggaguaaaugcaagagauagaaguauagcauuagcauuuuuagcaacaggaggaguauuaguauuuuuagcaacaaauguacaugcaugaggacuagucccuguucccagagcccacuuuuuuuucuuuuuuugaaauaaaauagccugucuuucagaucuaaaaaaaaaaaaaaaaaaaaaaaaaaaaaaaaaaaaaaaaaaaaaaaaaaaaaaaaaaaaaaaaugcaucccccccccccccccccccccccccccccccaaaggcucuuuucagagccaccagaauu

SEQ ID NO: 2122 - RNA, 2371 nt, Artificial Sequence
  mRNA product Design a-4 comprising derived and/or modified sequence from YFV__NC_002031.1__SSjev(V3)-prMEdelstem_TM-JEV (polyprotein: aa122-681) (opt6)
gggagacuccugucgggcggaaguaggaggaguagaguuuaaaaacaguacucuuuuuccgguucgggacguaguugaagcaacgacaagccggauaaccgcucuugagacaggaagcuuaccaugaaugaagguucaauuaugugguuggcaucauuagcaguuguaauugcaugugcuggugcaguuacauuaguaagaaagaaucgauggcugcuuuuaaaugugacaucagaggauuuagggaaaacauuuucgguaggaacaggaaauuguacuacaaauauacuugaagcaaaauauuggugcccagacucuauggaauauaauuguccaaauuuaaguccuagagaagaaccugacgauauagauuguugguguuaugguguagaaaauguaagaguagcauacggcaaaugcgauagugcaggacguucuagacguucaaggagagccauagaucugcccacucacgaaaaucacggauugaaaacacgacaagaaaaauggaugacugggcgaaugggagaaagacaacuacagaaaauugaaagaugguucguuagaaauccauucuuugccguaacagcuuuaacaauagccuauuuaguagguaguaauaugacacaaagaguaguaauagcauugcuaguguuagcaguuggaccagcuuauagugcacauugcauaggaauaacagauagagacuuuauagaaggaguacacgggggaacuuggguaagugccacuuuagaacaagauaaauguguuacagugauggcgccagauaaaccaagucuggacauaaguuuggaaacaguagcgauugauagacccgcagaaguaagaaaaguuuguuauaaugcuguucuaacccauguuaaaauaaaugauaaaugcccuagcaccggagaagcccaucuagcagaagaaaaugaaggagauaacgcauguaaacgaacauacucagauagaggauggggcaacggauguggcuuguuuggaaaagguagcauaguagcaugcgcuaaauuuacaugcgcaaagucaaugucauuauuugaaguagaucaaacaaaaauacaauauguaauaagagcucaauuacacgugggugcaaaacaagaaaauuggaauacagacauaaagacacuaaaguucgacgcauuaaguggaucacaagagguagaauuuauaggguacggaaaagcgacuuuagagugucaaguccaaacagcaguagauuucgguaacucauacauagcagaaauggaaacugaaaguuggauaguagauagacaaugggcacaagacuugacacuaccuuggcaaucaggaagcggaggaguauggagagaaaugcaucauuuaguagaauuugaaccaccucaugcagcaacaauaagaguauuagcccuaggaaaccaagaaggaaguuuaaaaacagcacuaacaggagcuaugagaguaacaaaagauacaaaugacaacaaucuauacaaauuacacggaggacauguaagcugccggguaaaguugagcgcacuaacauuaaaaggaacgaguuauaaaauaugcacagauaaaauguucuuuguuaaaaauccuacagauaccggucauggaacaguaguaaugcaaguaaaaguaaguaaaggcgcucccuguagaauaccuguaauagucgcagacgauuuaaccgcagcaauaaauaaaggaauauuagucacgguaaacccaauagcgucaacaaaugaugaugaaguauuaauagaaguuaacccaccuuuuggagacaguuauauaauagucggaaggggugauaguagacuaacauaccaauggcauaaagaaggaagcucaauaggaaguacacuaggaaaagcauuuaguacaacauuaaaaggagcacaaagauuagcagcauuaggagauacagcaugggauuuuggaagcauaggaggaguauuuaauaguauagguagagcaguacaucaaguauuuggaggagcauuuagaacauuauuuggaggaaugaguuggauaacacaaggauuaaugggagcauuauuauuauggaugggaguaaaugcaagagauagaaguauagcauuagcauuuuuagcaacaggaggaguauuaguauuuuuagcaacaaauguacaugcaugaggacuagucccuguucccagagcccacuuuuuuuucuuuuuuugaaauaaaauagccugucuuucagaucuaaaaaaaaaaaaaaaaaaaaaaaaaaaaaaaaaaaaaaaaaaaaaaaaaaaaaaaaaaaaaaaaugcaucccccccccccccccccccccccccccccccaaaggcucuuuucagagccaccagaauu

SEQ ID NO: 2123 - RNA, 2386 nt, Artificial Sequence
  mRNA product Design a-4 comprising derived and/or modified sequence from YFV__NC_002031.1__X-SS-prME (polyprotein: aa92-778) (opt6)
gggagacuccugucgggcggaaguaggaggaguagaguuuaaaaacaguacucuuuuuccgguucgggacguaguugaagcaacgacaagccggauaaccgcucuugagacaggaagcuuaccaugagaggauuaucaaguagaaaaagaagaucacaugauguacuaaccgugcaauuuuugaucuuagggaugcucuuaaugacaggagguguuacauuaguaagaaagaaucgauggcugcuuuuaaaugugacaucagaggauuuagggaaaacauuuucgguaggaacaggaaauuguacuacaaauauacuugaagcaaaauauuggugcccagacucuauggaauauaauuguccaaauuuaaguccuagagaagaaccugacgauauagauuguugguguuaugguguagaaaauguaagaguagcauacggcaaaugcgauagugcaggacguucuagacguucaaggagagccauagaucugcccacucacgaaaaucacggauugaaaacacgacaagaaaaauggaugacugggcgaaugggagaaagacaacuacagaaaauugaaagaugguucguuagaaauccauucuuugccguaacagcuuuaacaauagccuauuuaguagguaguaauaugacacaaagaguaguaauagcauugcuaguguuagcaguuggaccagcuuauagugcacauugcauaggaauaacagauagagacuuuauagaaggaguacacgggggaacuuggguaagugccacuuuagaacaagauaaauguguuacagugauggcgccagauaaaccaagucuggacauaaguuuggaaacaguagcgauugauagacccgcagaaguaagaaaaguuuguuauaaugcuguucuaacccauguuaaaauaaaugauaaaugcccuagcaccggagaagcccaucuagcagaagaaaaugaaggagauaacgcauguaaacgaacauacucagauagaggauggggcaacggauguggcuuguuuggaaaagguagcauaguagcaugcgcuaaauuuacaugcgcaaagucaaugucauuauuugaaguagaucaaacaaaaauacaauauguaauaagagcucaauuacacgugggugcaaaacaagaaaauuggaauacagacauaaagacacuaaaguucgacgcauuaaguggaucacaagagguagaauuuauaggguacggaaaagcgacuuuagagugucaaguccaaacagcaguagauuucgguaacucauacauagcagaaauggaaacugaaaguuggauaguagauagacaaugggcacaagacuugacacuaccuuggcaaucaggaagcggaggaguauggagagaaaugcaucauuuaguagaauuugaaccaccucaugcagcaacaauaagaguauuagcccuaggaaaccaagaaggaaguuuaaaaacagcacuaacaggagcuaugagaguaacaaaagauacaaaugacaacaaucuauacaaauuacacggaggacauguaagcugccggguaaaguugagcgcacuaacauuaaaaggaacgaguuauaaaauaugcacagauaaaauguucuuuguuaaaaauccuacagauaccggucauggaacaguaguaaugcaaguaaaaguaaguaaaggcgcucccuguagaauaccuguaauagucgcagacgauuuaaccgcagcaauaaauaaaggaauauuagucacgguaaacccaauagcgucaacaaaugaugaugaaguauuaauagaaguuaacccaccuuuuggagacaguuauauaauagucggaaggggugauaguagacuaacauaccaauggcauaaagaaggaagcucaauaggaaaauuauuuacucaaaccaugaaagguguagaaaggcuagcuguuaugggugacacagcaugggauuuuucaagcgcaggaggguucuuuacaucaguagguaaaggaauacauacaguauuuggaagugcauuucaaggauuauuuggugguuuaaauuggauaacaaaaguaauaaugggcgcaguuuuaauauggguagguauaaacacaagaaauaugacaaugucuaugaguaugauauuggucggaguaauaaugauguuuuuaucacuaggagugggugcaugaggacuagucccuguucccagagcccacuuuuuuuucuuuuuuugaaauaaaauagccugucuuucagaucuaaaaaaaaaaaaaaaaaaaaaaaaaaaaaaaaaaaaaaaaaaaaaaaaaaaaaaaaaaaaaaaaugcaucccccccccccccccccccccccccccccccaaaggcucuuuucagagccaccagaauu

SEQ ID NO: 2124 - RNA, 2389 nt, Artificial Sequence
  mRNA product Design a-4 comprising derived and/or modified sequence from YFV__NC_002031.1__SSjev(V3)-prME-XX (polyprotein: aa122-788) (opt6)
gggagacuccugucgggcggaaguaggaggaguagaguuuaaaaacaguacucuuuuuccgguucgggacguaguugaagcaacgacaagccggauaaccgcucuugagacaggaagcuuaccaugaaugaagguucaauuaugugguuggcaucauuagcaguuguaauugcaugugcuggugcaguuacauuaguaagaaagaaucgauggcugcuuuuaaaugugacaucagaggauuuagggaaaacauuuucgguaggaacaggaaauuguacuacaaauauacuugaagcaaaauauuggugcccagacucuauggaauauaauuguccaaauuuaaguccuagagaagaaccugacgauauagauuguugguguuaugguguagaaaauguaagaguagcauacggcaaaugcgauagugcaggacguucuagacguucaaggagagccauagaucugcccacucacgaaaaucacggauugaaaacacgacaagaaaaauggaugacugggcgaaugggagaaagacaacuacagaaaauugaaagaugguucguuagaaauccauucuuugccguaacagcuuuaacaauagccuauuuaguagguaguaauaugacacaaagaguaguaauagcauugcuaguguuagcaguuggaccagcuuauagugcacauugcauaggaauaacagauagagacuuuauagaaggaguacacgggggaacuuggguaagugccacuuuagaacaagauaaauguguuacagugauggcgccagauaaaccaagucuggacauaaguuuggaaacaguagcgauugauagacccgcagaaguaagaaaaguuuguuauaaugcuguucuaacccauguuaaaauaaaugauaaaugcccuagcaccggagaagcccaucuagcagaagaaaaugaaggagauaacgcauguaaacgaacauacucagauagaggauggggcaacggauguggcuuguuuggaaaagguagcauaguagcaugcgcuaaauuuacaugcgcaaagucaaugucauuauuugaaguagaucaaacaaaaauacaauauguaauaagagcucaauuacacgugggugcaaaacaagaaaauuggaauacagacauaaagacacuaaaguucgacgcauuaaguggaucacaagagguagaauuuauaggguacggaaaagcgacuuuagagugucaaguccaaacagcaguagauuucgguaacucauacauagcagaaauggaaacugaaaguuggauaguagauagacaaugggcacaagacuugacacuaccuuggcaaucaggaagcggaggaguauggagagaaaugcaucauuuaguagaauuugaaccaccucaugcagcaacaauaagaguauuagcccuaggaaaccaagaaggaaguuuaaaaacagcacuaacaggagcuaugagaguaacaaaagauacaaaugacaacaaucuauacaaauuacacggaggacauguaagcugccggguaaaguugagcgcacuaacauuaaaaggaacgaguuauaaaauaugcacagauaaaauguucuuuguuaaaaauccuacagauaccggucauggaacaguaguaaugcaaguaaaaguaaguaaaggcgcucccuguagaauaccuguaauagucgcagacgauuuaaccgcagcaauaaauaaaggaauauuagucacgguaaacccaauagcgucaacaaaugaugaugaaguauuaauagaaguuaacccaccuuuuggagacaguuauauaauagucggaaggggugauaguagacuaacauaccaauggcauaaagaaggaagcucaauaggaaaauuauuuacucaaaccaugaaagguguagaaaggcuagcuguuaugggugacacagcaugggauuuuucaagcgcaggaggguucuuuacaucaguagguaaaggaauacauacaguauuuggaagugcauuucaaggauuauuuggugguuuaaauuggauaacaaaaguaauaaugggcgcaguuuuaauauggguagguauaaacacaagaaauaugacaaugucuaugaguaugauauuggucggaguaauaaugauguuuuuaucacuaggagugggugcagaucaagguugcgcuauuaauuuuggaaaaugaggacuagucccuguucccagagcccacuuuuuuuucuuuuuuugaaauaaaauagccugucuuucagaucuaaaaaaaaaaaaaaaaaaaaaaaaaaaaaaaaaaaaaaaaaaaaaaaaaaaaaaaaaaaaaaaaugcaucccccccccccccccccccccccccccccccaaaggcucuuuucagagccaccagaauu

SEQ ID NO: 2125 - RNA, 2398 nt, Artificial Sequence
  mRNA product Design a-4 comprising derived and/or modified sequence from YFV__NC_002031.1__X-SS-prMEdelstem_TM-JEV (polyprotein: aa92-681) (opt11)
gggagacuccugucgggcggaaguaggaggaguagaguuuaaaaacaguacucuuuuuccgguucgggacguaguugaagcaacgacaagccggauaaccgcucuugagacaggaagcuuaccaugcggggacuaagcagcagaaaaagacgcagccacgaugugcucaccgugcaauuccucauacuggggaugcuccuaaugaccggaggcgugacccuaguaaggaaaaacagauggcuacuacuaaacguaaccucagaagaucuaggaaagacauuuucagucggcacaggcaacugcacaaccaacauacuagaagcaaaauauuggugcccagacagcauggaauacaacugucccaaccucagcccaagagaggaaccagacgacauagacugcugguguuacggaguagaaaacguaagaguggcauacggcaaaugcgacagcgcaggcaggagccgaagaucccgcagagccaucgacuugcccacgcacgaaaaccacggccucaaaacacgacaagaaaaauggaugacagggcgaaugggagaacgacagcuccagaaaauagaacgaugguucguccggaacccguucuucgcaguaacggcacuaacaaucgcauaccucguaggcagcaacaugacacaaagaguggucaucgcgcuacucguacuagcaguggggcccgcauacagugcacacugcauaggaaucacagaccgugacuucaucgaaggcguacacggaggaacguggguaagcgcgacacuggaacaagacaaaugcgugacaguaauggcaccagacaaaccaagccuagacauaucccuagaaacggucgccaucgaccgucccgcagaaguacgaaagguaugcuauaaugcaguccucacacacgucaaaauaaacgacaaaugccccagcacgggcgaagcacaccucgccgaagaaaacgaaggggauaacgcgugcaaacgcaccuacuccgacaggggauggggcaacggaugcggacuguucggaaaaggauccauagucgcaugcgcaaaauuuaccugcgcaaaaagcaugagcuuguucgagguagaccaaacgaagauccaauacguaauccgagcucaacuacacguuggggccaagcaagagaacuggaauacggacaucaaaacacuaaaauucgacgcacucuccggcucacaagaagucgaguucaucggcuacggcaaagcaacacuagaaugccaaguacaaacagcgguggacuucggcaacagcuacauagcagaaauggaaacagaaagcuggauaguagaccgacaaugggcacaagaccuaacucugccauggcaaagcggcucaggaggaguguggagagagaugcaccaccugguagaguucgaacccccacacgcagcaacaauaaggguacuggcacuaggcaaccaagaaggcagccuaaaaaccgcacucacaggagccaugcgcgugacgaaggacaccaacgacaacaaccucuacaaacuccacggagggcacguauccugccgcguaaaacuaucagcacuaacgcuaaaaggaacaagcuacaaaauaugcacagacaaaauguucuucgucaaaaaccccacagacacaggccacggcacagucguaaugcaagugaaggucagcaagggggcccccugccgaaucccagucauaguggcagacgaccucacggccgccaucaacaaagggauccugguaacagugaacccaauagcaucgaccaacgacgacgaaguccucauagaagugaaucccccguucggcgacagcuacaucaucguaggacgcggcgacucccgacugacguaccaauggcauaaagaaggcagcagcauugggagcacgcucgggaaagcguucucgaccacgcucaagggcgcgcaaaggcucgcggccuugggcgauaccgcgugggauuucgggagcauaggcggggucuuuaacucgaucgggcgcgcgguccaucaaguguucgggggcgcguucaggaccuuguucgggggcaugagcuggaucacgcaagggcucaugggcgcgcucuugcucuggaugggggucaaugccagggacaggagcauagccuuggccuuucucgcgaccgggggcgugcucguguucuuggccacgaacgugcacgcgugaggacuagucccuguucccagagcccacuuuuuuuucuuuuuuugaaauaaaauagccugucuuucagaucuaaaaaaaaaaaaaaaaaaaaaaaaaaaaaaaaaaaaaaaaaaaaaaaaaaaaaaaaaaaaaaaaugcaucccccccccccccccccccccccccccccccaaaggcucuuuucagagccaccagaauu

SEQ ID NO: 2126 - RNA, 2371 nt, Artificial Sequence
  mRNA product Design a-4 comprising derived and/or modified sequence from YFV__NC_002031.1__SSjev(V3)-prMEdelstem_TM-JEV (polyprotein: aa122-681) (opt11)
gggagacuccugucgggcggaaguaggaggaguagaguuuaaaaacaguacucuuuuuccgguucgggacguaguugaagcaacgacaagccggauaaccgcucuugagacaggaagcuuaccaugaacgagggcucgaucaugugguuggccucgcucgcggucgugaucgcgugcgcgggcgcggugacccuaguaaggaaaaacagauggcuacuacuaaacguaaccucagaagaucuaggaaagacauuuucagucggcacaggcaacugcacaaccaacauacuagaagcaaaauauuggugcccagacagcauggaauacaacugucccaaccucagcccaagagaggaaccagacgacauagacugcugguguuacggaguagaaaacguaagaguggcauacggcaaaugcgacagcgcaggcaggagccgaagaucccgcagagccaucgacuugcccacgcacgaaaaccacggccucaaaacacgacaagaaaaauggaugacagggcgaaugggagaacgacagcuccagaaaauagaacgaugguucguccggaacccguucuucgcaguaacggcacuaacaaucgcauaccucguaggcagcaacaugacacaaagaguggucaucgcgcuacucguacuagcaguggggcccgcauacagugcacacugcauaggaaucacagaccgugacuucaucgaaggcguacacggaggaacguggguaagcgcgacacuggaacaagacaaaugcgugacaguaauggcaccagacaaaccaagccuagacauaucccuagaaacggucgccaucgaccgucccgcagaaguacgaaagguaugcuauaaugcaguccucacacacgucaaaauaaacgacaaaugccccagcacgggcgaagcacaccucgccgaagaaaacgaaggggauaacgcgugcaaacgcaccuacuccgacaggggauggggcaacggaugcggacuguucggaaaaggauccauagucgcaugcgcaaaauuuaccugcgcaaaaagcaugagcuuguucgagguagaccaaacgaagauccaauacguaauccgagcucaacuacacguuggggccaagcaagagaacuggaauacggacaucaaaacacuaaaauucgacgcacucuccggcucacaagaagucgaguucaucggcuacggcaaagcaacacuagaaugccaaguacaaacagcgguggacuucggcaacagcuacauagcagaaauggaaacagaaagcuggauaguagaccgacaaugggcacaagaccuaacucugccauggcaaagcggcucaggaggaguguggagagagaugcaccaccugguagaguucgaacccccacacgcagcaacaauaaggguacuggcacuaggcaaccaagaaggcagccuaaaaaccgcacucacaggagccaugcgcgugacgaaggacaccaacgacaacaaccucuacaaacuccacggagggcacguauccugccgcguaaaacuaucagcacuaacgcuaaaaggaacaagcuacaaaauaugcacagacaaaauguucuucgucaaaaaccccacagacacaggccacggcacagucguaaugcaagugaaggucagcaagggggcccccugccgaaucccagucauaguggcagacgaccucacggccgccaucaacaaagggauccugguaacagugaacccaauagcaucgaccaacgacgacgaaguccucauagaagugaaucccccguucggcgacagcuacaucaucguaggacgcggcgacucccgacugacguaccaauggcauaaagaaggcagcagcauugggagcacgcucgggaaagcguucucgaccacgcucaagggcgcgcaaaggcucgcggccuugggcgauaccgcgugggauuucgggagcauaggcggggucuuuaacucgaucgggcgcgcgguccaucaaguguucgggggcgcguucaggaccuuguucgggggcaugagcuggaucacgcaagggcucaugggcgcgcucuugcucuggaugggggucaaugccagggacaggagcauagccuuggccuuucucgcgaccgggggcgugcucguguucuuggccacgaacgugcacgcgugaggacuagucccuguucccagagcccacuuuuuuuucuuuuuuugaaauaaaauagccugucuuucagaucuaaaaaaaaaaaaaaaaaaaaaaaaaaaaaaaaaaaaaaaaaaaaaaaaaaaaaaaaaaaaaaaaugcaucccccccccccccccccccccccccccccccaaaggcucuuuucagagccaccagaauu

SEQ ID NO: 2127 - RNA, 2386 nt, Artificial Sequence
  mRNA product Design a-4 comprising derived and/or modified sequence from YFV__NC_002031.1__X-SS-prME (polyprotein: aa92-778) (opt11)
gggagacuccugucgggcggaaguaggaggaguagaguuuaaaaacaguacucuuuuuccgguucgggacguaguugaagcaacgacaagccggauaaccgcucuugagacaggaagcuuaccaugcggggacuaagcagcagaaaaagacgcagccacgaugugcucaccgugcaauuccucauacuggggaugcuccuaaugaccggaggcgugacccuaguaaggaaaaacagauggcuacuacuaaacguaaccucagaagaucuaggaaagacauuuucagucggcacaggcaacugcacaaccaacauacuagaagcaaaauauuggugcccagacagcauggaauacaacugucccaaccucagcccaagagaggaaccagacgacauagacugcugguguuacggaguagaaaacguaagaguggcauacggcaaaugcgacagcgcaggcaggagccgaagaucccgcagagccaucgacuugcccacgcacgaaaaccacggccucaaaacacgacaagaaaaauggaugacagggcgaaugggagaacgacagcuccagaaaauagaacgaugguucguccggaacccguucuucgcaguaacggcacuaacaaucgcauaccucguaggcagcaacaugacacaaagaguggucaucgcgcuacucguacuagcaguggggcccgcauacagugcacacugcauaggaaucacagaccgugacuucaucgaaggcguacacggaggaacguggguaagcgcgacacuggaacaagacaaaugcgugacaguaauggcaccagacaaaccaagccuagacauaucccuagaaacggucgccaucgaccgucccgcagaaguacgaaagguaugcuauaaugcaguccucacacacgucaaaauaaacgacaaaugccccagcacgggcgaagcacaccucgccgaagaaaacgaaggggauaacgcgugcaaacgcaccuacuccgacaggggauggggcaacggaugcggacuguucggaaaaggauccauagucgcaugcgcaaaauuuaccugcgcaaaaagcaugagcuuguucgagguagaccaaacgaagauccaauacguaauccgagcucaacuacacguuggggccaagcaagagaacuggaauacggacaucaaaacacuaaaauucgacgcacucuccggcucacaagaagucgaguucaucggcuacggcaaagcaacacuagaaugccaaguacaaacagcgguggacuucggcaacagcuacauagcagaaauggaaacagaaagcuggauaguagaccgacaaugggcacaagaccuaacucugccauggcaaagcggcucaggaggaguguggagagagaugcaccaccugguagaguucgaacccccacacgcagcaacaauaaggguacuggcacuaggcaaccaagaaggcagccuaaaaaccgcacucacaggagccaugcgcgugacgaaggacaccaacgacaacaaccucuacaaacuccacggagggcacguauccugccgcguaaaacuaucagcacuaacgcuaaaaggaacaagcuacaaaauaugcacagacaaaauguucuucgucaaaaaccccacagacacaggccacggcacagucguaaugcaagugaaggucagcaagggggcccccugccgaaucccagucauaguggcagacgaccucacggccgccaucaacaaagggauccugguaacagugaacccaauagcaucgaccaacgacgacgaaguccucauagaagugaaucccccguucggcgacagcuacaucaucguaggacgcggcgacucccgacugacguaccaauggcauaaagaaggcagcagcauuggaaaacuauucacccaaaccaugaagggcgucgaaagacucgcggugaugggagacaccgcaugggacuucucgagcgcaggcggcuucuucacaagcguaggaaaagggauucacacaguauucggauccgcauuccaaggccucuucgggggacuaaacuggauaacgaaaguaauaaugggagcaguucucauauggguaggaaucaacacacgaaacaugacaauguccaugucaaugauacucguaggcguaaucaugauguuucugucacucggagugggagcaugaggacuagucccuguucccagagcccacuuuuuuuucuuuuuuugaaauaaaauagccugucuuucagaucuaaaaaaaaaaaaaaaaaaaaaaaaaaaaaaaaaaaaaaaaaaaaaaaaaaaaaaaaaaaaaaaaugcaucccccccccccccccccccccccccccccccaaaggcucuuuucagagccaccagaauu

SEQ ID NO: 2128 - RNA, 2389 nt, Artificial Sequence
  mRNA product Design a-4 comprising derived and/or modified sequence from YFV__NC_002031.1__SSjev(V3)-prME-XX (polyprotein: aa122-788) (opt11)
gggagacuccugucgggcggaaguaggaggaguagaguuuaaaaacaguacucuuuuuccgguucgggacguaguugaagcaacgacaagccggauaaccgcucuugagacaggaagcuuaccaugaacgagggcucgaucaugugguuggccucgcucgcggucgugaucgcgugcgcgggcgcggugacccuaguaaggaaaaacagauggcuacuacuaaacguaaccucagaagaucuaggaaagacauuuucagucggcacaggcaacugcacaaccaacauacuagaagcaaaauauuggugcccagacagcauggaauacaacugucccaaccucagcccaagagaggaaccagacgacauagacugcugguguuacggaguagaaaacguaagaguggcauacggcaaaugcgacagcgcaggcaggagccgaagaucccgcagagccaucgacuugcccacgcacgaaaaccacggccucaaaacacgacaagaaaaauggaugacagggcgaaugggagaacgacagcuccagaaaauagaacgaugguucguccggaacccguucuucgcaguaacggcacuaacaaucgcauaccucguaggcagcaacaugacacaaagaguggucaucgcgcuacucguacuagcaguggggcccgcauacagugcacacugcauaggaaucacagaccgugacuucaucgaaggcguacacggaggaacguggguaagcgcgacacuggaacaagacaaaugcgugacaguaauggcaccagacaaaccaagccuagacauaucccuagaaacggucgccaucgaccgucccgcagaaguacgaaagguaugcuauaaugcaguccucacacacgucaaaauaaacgacaaaugccccagcacgggcgaagcacaccucgccgaagaaaacgaaggggauaacgcgugcaaacgcaccuacuccgacaggggauggggcaacggaugcggacuguucggaaaaggauccauagucgcaugcgcaaaauuuaccugcgcaaaaagcaugagcuuguucgagguagaccaaacgaagauccaauacguaauccgagcucaacuacacguuggggccaagcaagagaacuggaauacggacaucaaaacacuaaaauucgacgcacucuccggcucacaagaagucgaguucaucggcuacggcaaagcaacacuagaaugccaaguacaaacagcgguggacuucggcaacagcuacauagcagaaauggaaacagaaagcuggauaguagaccgacaaugggcacaagaccuaacucugccauggcaaagcggcucaggaggaguguggagagagaugcaccaccugguagaguucgaacccccacacgcagcaacaauaaggguacuggcacuaggcaaccaagaaggcagccuaaaaaccgcacucacaggagccaugcgcgugacgaaggacaccaacgacaacaaccucuacaaacuccacggagggcacguauccugccgcguaaaacuaucagcacuaacgcuaaaaggaacaagcuacaaaauaugcacagacaaaauguucuucgucaaaaaccccacagacacaggccacggcacagucguaaugcaagugaaggucagcaagggggcccccugccgaaucccagucauaguggcagacgaccucacggccgccaucaacaaagggauccugguaacagugaacccaauagcaucgaccaacgacgacgaaguccucauagaagugaaucccccguucggcgacagcuacaucaucguaggacgcggcgacucccgacugacguaccaauggcauaaagaaggcagcagcauuggaaaacuauucacccaaaccaugaagggcgucgaaagacucgcggugaugggagacaccgcaugggacuucucgagcgcaggcggcuucuucacaagcguaggaaaagggauucacacaguauucggauccgcauuccaaggccucuucgggggacuaaacuggauaacgaaaguaauaaugggagcaguucucauauggguaggaaucaacacacgaaacaugacaauguccaugucaaugauacucguaggcguaaucaugauguuucugucacucggagugggagcagaccaagguugcgccauaaacuucggcaagugaggacuagucccuguucccagagcccacuuuuuuuucuuuuuuugaaauaaaauagccugucuuucagaucuaaaaaaaaaaaaaaaaaaaaaaaaaaaaaaaaaaaaaaaaaaaaaaaaaaaaaaaaaaaaaaaaugcaucccccccccccccccccccccccccccccccaaaggcucuuuucagagccaccagaauu

SEQ ID NO: 2129 - RNA, 2335 nt, Artificial Sequence
  mRNA product Design a-1 (hSL-A64-N5) comprising derived and/or modified sequence from YFV__NC_002031.1__X-SS-prME-XX (polyprotein: aa92-788) (opt1)
gggagagucccgcagucggcguccagcggcucugcuuguucgugugugugucguugcaggccuuauucaagcuuaccaugcggggccugagcucccgcaagcggcgcagccacgacgugcucaccguccaguuccugauccuggggaugcuccugaugaccggcggggugacgcuggugcggaagaaccgcuggcuccugcugaacgucaccuccgaggaccucggcaagaccuucagcguggggaccggcaacugcacgaccaacauccuggaggccaaguacuggugccccgacuccauggaguacaacugcccgaaccugagcccccgggaggagcccgacgacaucgacugcuggugcuacggcguggagaacguccgcguggccuacgggaagugcgacuccgcgggccggagccgccggucccgccgggccaucgaccuccccacccacgagaaccacgggcugaagacccgccaggagaaguggaugacgggccggaugggggagcgccagcugcagaagaucgagcggugguucgugcgcaacccguucuucgccgucaccgcccucaccaucgccuaccuggugggcagcaacaugacccagcggguggucaucgcgcugcucgugcuggccgugggccccgccuacuccgcccacugcaucgggaucacggaccgcgacuucaucgagggcguccacgggggcaccugggugagcgcgacccuggagcaggacaagugcgugaccgucauggcccccgacaagcccucccucgacaucagccuggagacgguggccaucgaccggccggccgaggugcgcaaggucugcuacaacgccgugcugacccacgugaagaucaacgacaagugccccuccaccggcgaggcgcaccucgccgaggagaacgagggggacaacgccugcaagcggaccuacagcgaccggggcugggggaacggcugcgggcuguucggcaagggcuccaucgucgccugcgccaaguucacgugcgcgaagagcaugucccuguucgagguggaccagaccaagauccaguacgucauccgcgcccagcuccacgugggggccaagcaggagaacuggaacaccgacaucaagacccugaaguucgacgcccugagcggcagccaggagguggaguucaucggguacggcaaggccacgcucgagugccagguccagaccgcgguggacuucgggaacuccuacaucgccgagauggagaccgagagcuggaucguggaccggcagugggcccaggaccugacccugcccuggcaguccggcagcggcggggucuggcgcgagaugcaccaccucguggaguucgagcccccgcacgccgccacgauccgggugcuggcgcugggcaaccaggaggggucccucaagaccgcccugaccggcgccaugcgcgucaccaaggacacgaacgacaacaaccuguacaagcuccacgggggccacgugagcugccgggugaagcuguccgcccugacccucaagggcaccagcuacaagaucugcaccgacaagauguucuucgucaagaaccccacggacaccgggcacggcaccguggugaugcaggucaagguguccaagggggcgcccugccgcaucccggugaucgucgccgacgaccugaccgccgccaucaacaagggcauccuggugaccgugaacccgaucgccagcacgaacgacgacgagguccucaucgaggugaacccccccuucggcgacuccuacaucaucguggggcggggcgacagccgccugaccuaccaguggcacaaggagggguccagcaucggcaagcuguucacccagaccaugaagggggucgagcggcuggcggugaugggcgacacggccugggacuucuccagcgccggcggguucuucaccuccgugggcaaggggauccacaccgucuucggcagcgccuuccaggggcucuucggcggccugaacuggaucaccaaggugaucaugggggccgugcugaucugggucggcaucaacacgcgcaacaugaccauguccaugagcaugauccucgugggggugaucaugauguuccugagccugggcgucggggcggaccagggcugcgccaucaacuucggcaagugaggacuagucccuguucccagagcccacuuuuuuuucuuuuuuugaaauaaaauagccugucuuucagaucucaaaggcucuuuucagagccaccaaaaaaaaaaaaaaaaaaaaaaaaaaaaaaaaaaaaaaaaaaaaaaaaaaaaaaaaaaaaaaaaagaauu

SEQ ID NO: 2130 - RNA, 2335 nt, Artificial Sequence
  mRNA product Design a-1 (hSL-A64-N5) comprising derived and/or modified sequence from YFV__NC_002031.1__X-SS-prME-XX (polyprotein: aa92-788) (opt1)
gggagagucccgcagucggcguccagcggcucugcuuguucgugugugugucguugcaggccuuauucaagcuuaccaugcggggccugagcucccgcaagcggcgcagccacgacgugcucaccguccaguuccugauccuggggaugcuccugaugaccggcggggugacgcuggugcggaagaaccgcuggcuccugcugaacgucaccuccgaggaccucggcaagaccuucagcguggggaccggcaacugcacgaccaacauccuggaggccaaguacuggugccccgacuccauggaguacaacugcccgaaccugagcccccgggaggagcccgacgacaucgacugcuggugcuacggcguggagaacguccgcguggccuacgggaagugcgacuccgcgggccggagccgccggucccgccgggccaucgaccuccccacccacgagaaccacgggcugaagacccgccaggagaaguggaugacgggccggaugggggagcgccagcugcagaagaucgagcggugguucgugcgcaacccguucuucgccgucaccgcccucaccaucgccuaccuggugggcagcaacaugacccagcggguggucaucgcgcugcucgugcuggccgugggccccgccuacuccgcccacugcaucgggaucacggaccgcgacuucaucgagggcguccacgggggcaccugggugagcgcgacccuggagcaggacaagugcgugaccgucauggcccccgacaagcccucccucgacaucagccuggagacgguggccaucgaccggccggccgaggugcgcaaggucugcuacaacgccgugcugacccacgugaagaucaacgacaagugccccuccaccggcgaggcgcaccucgccgaggagaacgagggggacaacgccugcaagcggaccuacagcgaccggggcugggggaacggcugcgggcuguucggcaagggcuccaucgucgccugcgccaaguucacgugcgcgaaguccaugagccuguucgagguggaccagaccaagauccaguacgucauccgcgcccagcuccacgugggggccaagcaggagaacuggaacaccgacaucaagacccugaaguucgacgcccugagcggcagccaggagguggaguucaucggguacggcaaggccacgcucgagugccagguccagaccgcgguggacuucgggaacuccuacaucgccgagauggagaccgagagcuggaucguggaccggcagugggcccaggaccugacccugcccuggcaguccggcagcggcggggucuggcgcgagaugcaccaccucguggaguucgagcccccgcacgccgccacgauccgggugcuggcgcugggcaaccaggaggggucccucaagaccgcccugaccggcgccaugcgcgucaccaaggacacgaacgacaacaaccuguacaagcuccacgggggccacgugagcugccgggugaagcuguccgcccugacccucaagggcaccagcuacaagaucugcaccgacaagauguucuucgucaagaaccccacggacaccgggcacggcaccguggugaugcaggucaagguguccaagggggcgcccugccgcaucccggugaucgucgccgacgaccugaccgccgccaucaacaagggcauccuggugaccgugaacccgaucgccagcacgaacgacgacgagguccucaucgaggugaacccccccuucggcgacuccuacaucaucguggggcggggcgacagccgccugaccuaccaguggcacaaggagggguccagcaucggcaagcuguucacccagaccaugaagggggucgagcggcuggcggugaugggcgacacggccugggacuucuccagcgccggcggguucuucaccuccgugggcaaggggauccacaccgucuucggcagcgccuuccaggggcuguucggcggccucaacuggaucaccaaggugaucaugggggccgugcugaucugggucggcaucaacacgcgcaacaugaccauguccaugagcaugauccucgugggggugaucaugauguuccugagccugggcgucggggcggaccagggcugcgccaucaacuucggcaagugaggacuagucccuguucccagagcccacuuuuuuuucuuuuuuugaaauaaaauagccugucuuucagaucucaaaggcucuuuucagagccaccaaaaaaaaaaaaaaaaaaaaaaaaaaaaaaaaaaaaaaaaaaaaaaaaaaaaaaaaaaaaaaaaagaauu

SEQ ID NO: 2131 - RNA, 2305 nt, Artificial Sequence
  mRNA product Design a-1 (hSL-A64-N5) comprising derived and/or modified sequence from YFV__NC_002031.1__X-SS-prME (polyprotein: aa92-778) (opt1)
gggagagucccgcagucggcguccagcggcucugcuuguucgugugugugucguugcaggccuuauucaagcuuaccaugcggggccugagcucccgcaagcggcgcagccacgacgugcucaccguccaguuccugauccuggggaugcuccugaugaccggcggggugacgcuggugcggaagaaccgcuggcuccugcugaacgucaccuccgaggaccucggcaagaccuucagcguggggaccggcaacugcacgaccaacauccuggaggccaaguacuggugccccgacuccauggaguacaacugccccaaccugagcccccgggaggagcccgacgacaucgacugcuggugcuacggcguggagaacguccgcguggccuacgggaagugcgacuccgcgggccggagccgccggucccgccgggccaucgaccuccccacccacgagaaccacgggcugaagacccgccaggagaaguggaugacgggccggaugggggagcgccagcugcagaagaucgagcggugguucgugcgcaacccguucuucgccgucaccgcccucaccaucgccuaccuggugggcagcaacaugacccagcggguggucaucgcgcugcucgugcuggccgugggccccgccuacuccgcccacugcaucgggaucacggaccgcgacuucaucgagggcguccacgggggcaccugggugagcgcgacccuggagcaggacaagugcgugaccgucauggcccccgacaagcccucccucgacaucagccuggagacgguggccaucgaccggccggccgaggugcgcaaggucugcuacaacgccgugcugacccacgugaagaucaacgacaagugccccuccaccggcgaggcgcaccucgccgaggagaacgagggggacaacgccugcaagcggaccuacagcgaccggggcugggggaacggcugcgggcuguucggcaagggcuccaucgucgccugcgccaaguucacgugcgcgaaguccaugagccuguucgagguggaccagaccaagauccaguacgucauccgcgcccagcuccacgugggggccaagcaggagaacuggaacaccgacaucaagacccugaaguucgacgcccugagcggcagccaggagguggaguucaucggguacggcaaggccacgcucgagugccagguccagaccgcgguggacuucgggaacuccuacaucgccgagauggagaccgagagcuggaucguggaccggcagugggcccaggaccugacccugcccuggcaguccggcagcggcggggucuggcgcgagaugcaccaccucguggaguucgagcccccgcacgccgccacgauccgggugcuggcgcugggcaaccaggaggggucccucaagaccgcccugaccggcgccaugcgcgucaccaaggacacgaacgacaacaaccuguacaagcuccacgggggccacgugagcugccgggugaagcuguccgcccugacccucaagggcaccagcuacaagaucugcaccgacaagauguucuucgucaagaaccccacggacaccgggcacggcaccguggugaugcaggucaagguguccaagggggcgcccugccgcaucccggugaucgucgccgacgaccugaccgccgccaucaacaagggcauccuggugaccgugaacccgaucgccagcacgaacgacgacgagguccucaucgaggugaacccgcccuucggcgacuccuacaucaucguggggcggggcgacagccgccugaccuaccaguggcacaaggagggguccagcaucggcaagcuguucacccagaccaugaagggggucgagcggcuggcggugaugggcgacacggccugggacuucuccagcgccggcggguucuucaccuccgugggcaaggggauccacaccgucuucggcagcgccuuccaggggcuguucggcggccucaacuggaucaccaaggugaucaugggggccgugcugaucugggucggcaucaacacgcgcaacaugaccauguccaugagcaugauccucgugggggugaucaugauguuccugagccugggcgucggggcgugaggacuagucccuguucccagagcccacuuuuuuuucuuuuuuugaaauaaaauagccugucuuucagaucucaaaggcucuuuucagagccaccaaaaaaaaaaaaaaaaaaaaaaaaaaaaaaaaaaaaaaaaaaaaaaaaaaaaaaaaaaaaaaaaagaauu

SEQ ID NO: 2132 - RNA, 2308 nt, Artificial Sequence
  mRNA product Design a-1 (hSL-A64-N5) comprising derived and/or modified sequence from YFV__NC_002031.1__SSjev(V3)-prME-XX (polyprotein: aa122-788) (opt1)
gggagagucccgcagucggcguccagcggcucugcuuguucgugugugugucguugcaggccuuauucaagcuuaccaugaacgagggcagcaucauguggcuggccucccucgccguggucaucgcgugcgccggggccgugacgcuggugcggaagaaccgcuggcuccugcugaacgucaccuccgaggaccucggcaagaccuucagcguggggaccggcaacugcacgaccaacauccuggaggccaaguacuggugccccgacuccauggaguacaacugccccaaccugagcccccgggaggagcccgacgacaucgacugcuggugcuacggcguggagaacguccgcguggccuacgggaagugcgacuccgcgggccggagccgccggucccgccgggccaucgaccuccccacccacgagaaccacgggcugaagacccgccaggagaaguggaugacgggccggaugggggagcgccagcugcagaagaucgagcggugguucgugcgcaacccguucuucgccgucaccgcccucaccaucgccuaccuggugggcagcaacaugacccagcggguggucaucgcgcugcucgugcuggccgugggccccgccuacuccgcccacugcaucgggaucacggaccgcgacuucaucgagggcguccacgggggcaccugggugagcgcgacccuggagcaggacaagugcgugaccgucauggcccccgacaagcccucccucgacaucagccuggagacgguggccaucgaccggccggccgaggugcgcaaggucugcuacaacgccgugcugacccacgugaagaucaacgacaagugccccuccaccggcgaggcgcaccucgccgaggagaacgagggggacaacgccugcaagcggaccuacagcgaccggggcugggggaacggcugcgggcuguucggcaagggcuccaucgucgccugcgccaaguucacgugcgcgaaguccaugagccuguucgagguggaccagaccaagauccaguacgucauccgcgcccagcuccacgugggggccaagcaggagaacuggaacaccgacaucaagacccugaaguucgacgcccugagcggcagccaggagguggaguucaucggguacggcaaggccacgcucgagugccagguccagaccgcgguggacuucgggaacuccuacaucgccgagauggagaccgagagcuggaucguggaccggcagugggcccaggaccugacccugcccuggcaguccggcagcggcggggucuggcgcgagaugcaccaccucguggaguucgagcccccgcacgccgccacgauccgggugcuggcgcugggcaaccaggaggggucccucaagaccgcccugaccggcgccaugcgcgucaccaaggacacgaacgacaacaaccuguacaagcuccacgggggccacgugagcugccgggugaagcuguccgcccugacccucaagggcaccagcuacaagaucugcaccgacaagauguucuucgucaagaaccccacggacaccgggcacggcaccguggugaugcaggucaagguguccaagggggcgcccugccgcaucccggugaucgucgccgacgaccugaccgccgccaucaacaagggcauccuggugaccgugaacccgaucgccagcacgaacgacgacgagguccucaucgaggugaacccgcccuucggcgacuccuacaucaucguggggcggggcgacagccgccugaccuaccaguggcacaaggagggguccagcaucggcaagcuguucacccagaccaugaagggggucgagcggcuggcggugaugggcgacacggccugggacuucuccagcgccggcggguucuucaccuccgugggcaaggggauccacaccgucuucggcagcgccuuccaggggcuguucggcggccucaacuggaucaccaaggugaucaugggggccgugcugaucugggucggcaucaacacgcgcaacaugaccauguccaugagcaugauccucgugggggugaucaugauguuccugagccugggcgucggggcggaccagggcugcgccaucaacuucggcaagugaggacuagucccuguucccagagcccacuuuuuuuucuuuuuuugaaauaaaauagccugucuuucagaucucaaaggcucuuuucagagccaccaaaaaaaaaaaaaaaaaaaaaaaaaaaaaaaaaaaaaaaaaaaaaaaaaaaaaaaaaaaaaaaaagaauu

SEQ ID NO: 2133 - RNA, 2317 nt, Artificial Sequence
  mRNA product Design a-1 (hSL-A64-N5) comprising derived and/or modified sequence from YFV__NC_002031.1__X-SS-prMEdelstem_TM-JEV (polyprotein: aa92-681) (opt1)
gggagagucccgcagucggcguccagcggcucugcuuguucgugugugugucguugcaggccuuauucaagcuuaccaugcggggccugagcucccgcaagcggcgcagccacgacgugcucaccguccaguuccugauccuggggaugcuccugaugaccggcggggugacgcuggugcggaagaaccgcuggcuccugcugaacgucaccuccgaggaccucggcaagaccuucagcguggggaccggcaacugcacgaccaacauccuggaggccaaguacuggugccccgacuccauggaguacaacugccccaaccugagcccccgggaggagcccgacgacaucgacugcuggugcuacggcguggagaacguccgcguggccuacgggaagugcgacuccgcgggccggagccgccggucccgccgggccaucgaccuccccacccacgagaaccacgggcugaagacccgccaggagaaguggaugacgggccggaugggggagcgccagcugcagaagaucgagcggugguucgugcgcaacccguucuucgccgucaccgcccucaccaucgccuaccuggugggcagcaacaugacccagcggguggucaucgcgcugcucgugcuggccgugggccccgccuacuccgcccacugcaucgggaucacggaccgcgacuucaucgagggcguccacgggggcaccugggugagcgcgacccuggagcaggacaagugcgugaccgucauggcccccgacaagcccucccucgacaucagccuggagacgguggccaucgaccggccggccgaggugcgcaaggucugcuacaacgccgugcugacccacgugaagaucaacgacaagugccccuccaccggcgaggcgcaccucgccgaggagaacgagggggacaacgccugcaagcggaccuacagcgaccggggcugggggaacggcugcgggcuguucggcaagggcuccaucgucgccugcgccaaguucacgugcgcgaaguccaugagccuguucgagguggaccagaccaagauccaguacgucauccgcgcccagcuccacgugggggccaagcaggagaacuggaacaccgacaucaagacccugaaguucgacgcccugagcggcagccaggagguggaguucaucggguacggcaaggccacgcucgagugccagguccagaccgcgguggacuucgggaacuccuacaucgccgagauggagaccgagagcuggaucguggaccggcagugggcccaggaccugacccugcccuggcaguccggcagcggcggggucuggcgcgagaugcaccaccucguggaguucgagcccccgcacgccgccacgauccgggugcuggcgcugggcaaccaggaggggucccucaagaccgcccugaccggcgccaugcgcgucaccaaggacacgaacgacaacaaccuguacaagcuccacgggggccacgugagcugccgggugaagcuguccgcccugacccucaagggcaccagcuacaagaucugcaccgacaagauguucuucgucaagaaccccacggacaccgggcacggcaccguggugaugcaggucaagguguccaagggggcgcccugccgcaucccggugaucgucgccgacgaccugaccgccgccaucaacaagggcauccuggugaccgugaacccgaucgccagcacgaacgacgacgagguccucaucgaggugaacccgcccuucggcgacuccuacaucaucguggggcggggcgacagccgccugaccuaccaguggcacaaggagggguccagcaucggaagcacgcugggcaaggccuuuucaacaacuuugaagggagcucaaagacuggcagcguugggcgacacagccugggacuuuggcucuauuggaggggucuucaacuccauagguagagccguucaccaaguguuuggaggugccuucagaacacucuuugggggaaugucuuggaucacacaagggcuaaugggugcccuacugcucuggaugggcgucaacgcacgagaccgaucaauugcuuuggccuucuuagccacaggaggugugcucguguucuuagcgaccaaugugcacgccugaggacuagucccuguucccagagcccacuuuuuuuucuuuuuuugaaauaaaauagccugucuuucagaucucaaaggcucuuuucagagccaccaaaaaaaaaaaaaaaaaaaaaaaaaaaaaaaaaaaaaaaaaaaaaaaaaaaaaaaaaaaaaaaaagaauu

SEQ ID NO: 2134 - RNA, 2290 nt, Artificial Sequence
  mRNA product Design a-1 (hSL-A64-N5) comprising derived and/or modified sequence from YFV__NC_002031.1__SSjev(V3)-prMEdelstem_TM-JEV (polyprotein: aa122-681) (opt1)
gggagagucccgcagucggcguccagcggcucugcuuguucgugugugugucguugcaggccuuauucaagcuuaccaugaacgagggcagcaucauguggcuggccucccucgccguggucaucgcgugcgccggggccgugacgcuggugcggaagaaccgcuggcuccugcugaacgucaccuccgaggaccucggcaagaccuucagcguggggaccggcaacugcacgaccaacauccuggaggccaaguacuggugccccgacuccauggaguacaacugccccaaccugagcccccgggaggagcccgacgacaucgacugcuggugcuacggcguggagaacguccgcguggccuacgggaagugcgacuccgcgggccggagccgccggucccgccgggccaucgaccuccccacccacgagaaccacgggcugaagacccgccaggagaaguggaugacgggccggaugggggagcgccagcugcagaagaucgagcggugguucgugcgcaacccguucuucgccgucaccgcccucaccaucgccuaccuggugggcagcaacaugacccagcggguggucaucgcgcugcucgugcuggccgugggccccgccuacuccgcccacugcaucgggaucacggaccgcgacuucaucgagggcguccacgggggcaccugggugagcgcgacccuggagcaggacaagugcgugaccgucauggcccccgacaagcccucccucgacaucagccuggagacgguggccaucgaccggccggccgaggugcgcaaggucugcuacaacgccgugcugacccacgugaagaucaacgacaagugccccuccaccggcgaggcgcaccucgccgaggagaacgagggggacaacgccugcaagcggaccuacagcgaccggggcugggggaacggcugcgggcuguucggcaagggcuccaucgucgccugcgccaaguucacgugcgcgaaguccaugagccuguucgagguggaccagaccaagauccaguacgucauccgcgcccagcuccacgugggggccaagcaggagaacuggaacaccgacaucaagacccugaaguucgacgcccugagcggcagccaggagguggaguucaucggguacggcaaggccacgcucgagugccagguccagaccgcgguggacuucgggaacuccuacaucgccgagauggagaccgagagcuggaucguggaccggcagugggcccaggaccugacccugcccuggcaguccggcagcggcggggucuggcgcgagaugcaccaccucguggaguucgagcccccgcacgccgccacgauccgggugcuggcgcugggcaaccaggaggggucccucaagaccgcccugaccggcgccaugcgcgucaccaaggacacgaacgacaacaaccuguacaagcuccacgggggccacgugagcugccgggugaagcuguccgcccugacccucaagggcaccagcuacaagaucugcaccgacaagauguucuucgucaagaaccccacggacaccgggcacggcaccguggugaugcaggucaagguguccaagggggcgcccugccgcaucccggugaucgucgccgacgaccugaccgccgccaucaacaagggcauccuggugaccgugaacccgaucgccagcacgaacgacgacgagguccucaucgaggugaacccgcccuucggcgacuccuacaucaucguggggcggggcgacagccgccugaccuaccaguggcacaaggagggguccagcaucggcagcacccuggggaaggccuucuccaccacgcucaagggcgcccagcgccuggcggcccugggggacaccgccugggacuucggcagcaucgggggcguguucaacuccaucggccgggccguccaccagguguucgggggcgccuuccgcacccucuucgggggcaugagcuggaucacccaggggcugaugggcgcgcugcuccuguggaugggggugaacgcccgggaccgcuccaucgcccuggccuuccucgcgacgggcggcguccugguguuccuggccaccaacgugcacgccugaggacuagucccuguucccagagcccacuuuuuuuucuuuuuuugaaauaaaauagccugucuuucagaucucaaaggcucuuuucagagccaccaaaaaaaaaaaaaaaaaaaaaaaaaaaaaaaaaaaaaaaaaaaaaaaaaaaaaaaaaaaaaaaaagaauu

SEQ ID NO: 2135 - RNA, 2276 nt, Artificial Sequence
  mRNA product Design i-3 (hSL-A64-N5) comprising derived and/or modified sequence from YFV__NC_002031.1__X-SS-prME-XX (polyprotein: aa92-788) (opt1)
gggagaaagcuuaccaugcggggccugagcucccgcaagcggcgcagccacgacgugcucaccguccaguuccugauccuggggaugcuccugaugaccggcggggugacgcuggugcggaagaaccgcuggcuccugcugaacgucaccuccgaggaccucggcaagaccuucagcguggggaccggcaacugcacgaccaacauccuggaggccaaguacuggugccccgacuccauggaguacaacugcccgaaccugagcccccgggaggagcccgacgacaucgacugcuggugcuacggcguggagaacguccgcguggccuacgggaagugcgacuccgcgggccggagccgccggucccgccgggccaucgaccuccccacccacgagaaccacgggcugaagacccgccaggagaaguggaugacgggccggaugggggagcgccagcugcagaagaucgagcggugguucgugcgcaacccguucuucgccgucaccgcccucaccaucgccuaccuggugggcagcaacaugacccagcggguggucaucgcgcugcucgugcuggccgugggccccgccuacuccgcccacugcaucgggaucacggaccgcgacuucaucgagggcguccacgggggcaccugggugagcgcgacccuggagcaggacaagugcgugaccgucauggcccccgacaagcccucccucgacaucagccuggagacgguggccaucgaccggccggccgaggugcgcaaggucugcuacaacgccgugcugacccacgugaagaucaacgacaagugccccuccaccggcgaggcgcaccucgccgaggagaacgagggggacaacgccugcaagcggaccuacagcgaccggggcugggggaacggcugcgggcuguucggcaagggcuccaucgucgccugcgccaaguucacgugcgcgaagagcaugucccuguucgagguggaccagaccaagauccaguacgucauccgcgcccagcuccacgugggggccaagcaggagaacuggaacaccgacaucaagacccugaaguucgacgcccugagcggcagccaggagguggaguucaucggguacggcaaggccacgcucgagugccagguccagaccgcgguggacuucgggaacuccuacaucgccgagauggagaccgagagcuggaucguggaccggcagugggcccaggaccugacccugcccuggcaguccggcagcggcggggucuggcgcgagaugcaccaccucguggaguucgagcccccgcacgccgccacgauccgggugcuggcgcugggcaaccaggaggggucccucaagaccgcccugaccggcgccaugcgcgucaccaaggacacgaacgacaacaaccuguacaagcuccacgggggccacgugagcugccgggugaagcuguccgcccugacccucaagggcaccagcuacaagaucugcaccgacaagauguucuucgucaagaaccccacggacaccgggcacggcaccguggugaugcaggucaagguguccaagggggcgcccugccgcaucccggugaucgucgccgacgaccugaccgccgccaucaacaagggcauccuggugaccgugaacccgaucgccagcacgaacgacgacgagguccucaucgaggugaacccccccuucggcgacuccuacaucaucguggggcggggcgacagccgccugaccuaccaguggcacaaggagggguccagcaucggcaagcuguucacccagaccaugaagggggucgagcggcuggcggugaugggcgacacggccugggacuucuccagcgccggcggguucuucaccuccgugggcaaggggauccacaccgucuucggcagcgccuuccaggggcucuucggcggccugaacuggaucaccaaggugaucaugggggccgugcugaucugggucggcaucaacacgcgcaacaugaccauguccaugagcaugauccucgugggggugaucaugauguuccugagccugggcgucggggcggaccagggcugcgccaucaacuucggcaagugaggacuaguuauaagacugacuagcccgaugggccucccaacgggcccuccuccccuccuugcaccgagauuaaucaaaggcucuuuucagagccaccaaaaaaaaaaaaaaaaaaaaaaaaaaaaaaaaaaaaaaaaaaaaaaaaaaaaaaaaaaaaaaaaagaauu

SEQ ID NO: 2136 - RNA, 2276 nt, Artificial Sequence
  mRNA product Design i-3 (hSL-A64-N5) comprising derived and/or modified sequence from YFV__NC_002031.1__X-SS-prME-XX (polyprotein: aa92-788) (opt1)
gggagaaagcuuaccaugcggggccugagcucccgcaagcggcgcagccacgacgugcucaccguccaguuccugauccuggggaugcuccugaugaccggcggggugacgcuggugcggaagaaccgcuggcuccugcugaacgucaccuccgaggaccucggcaagaccuucagcguggggaccggcaacugcacgaccaacauccuggaggccaaguacuggugccccgacuccauggaguacaacugcccgaaccugagcccccgggaggagcccgacgacaucgacugcuggugcuacggcguggagaacguccgcguggccuacgggaagugcgacuccgcgggccggagccgccggucccgccgggccaucgaccuccccacccacgagaaccacgggcugaagacccgccaggagaaguggaugacgggccggaugggggagcgccagcugcagaagaucgagcggugguucgugcgcaacccguucuucgccgucaccgcccucaccaucgccuaccuggugggcagcaacaugacccagcggguggucaucgcgcugcucgugcuggccgugggccccgccuacuccgcccacugcaucgggaucacggaccgcgacuucaucgagggcguccacgggggcaccugggugagcgcgacccuggagcaggacaagugcgugaccgucauggcccccgacaagcccucccucgacaucagccuggagacgguggccaucgaccggccggccgaggugcgcaaggucugcuacaacgccgugcugacccacgugaagaucaacgacaagugccccuccaccggcgaggcgcaccucgccgaggagaacgagggggacaacgccugcaagcggaccuacagcgaccggggcugggggaacggcugcgggcuguucggcaagggcuccaucgucgccugcgccaaguucacgugcgcgaaguccaugagccuguucgagguggaccagaccaagauccaguacgucauccgcgcccagcuccacgugggggccaagcaggagaacuggaacaccgacaucaagacccugaaguucgacgcccugagcggcagccaggagguggaguucaucggguacggcaaggccacgcucgagugccagguccagaccgcgguggacuucgggaacuccuacaucgccgagauggagaccgagagcuggaucguggaccggcagugggcccaggaccugacccugcccuggcaguccggcagcggcggggucuggcgcgagaugcaccaccucguggaguucgagcccccgcacgccgccacgauccgggugcuggcgcugggcaaccaggaggggucccucaagaccgcccugaccggcgccaugcgcgucaccaaggacacgaacgacaacaaccuguacaagcuccacgggggccacgugagcugccgggugaagcuguccgcccugacccucaagggcaccagcuacaagaucugcaccgacaagauguucuucgucaagaaccccacggacaccgggcacggcaccguggugaugcaggucaagguguccaagggggcgcccugccgcaucccggugaucgucgccgacgaccugaccgccgccaucaacaagggcauccuggugaccgugaacccgaucgccagcacgaacgacgacgagguccucaucgaggugaacccccccuucggcgacuccuacaucaucguggggcggggcgacagccgccugaccuaccaguggcacaaggagggguccagcaucggcaagcuguucacccagaccaugaagggggucgagcggcuggcggugaugggcgacacggccugggacuucuccagcgccggcggguucuucaccuccgugggcaaggggauccacaccgucuucggcagcgccuuccaggggcuguucggcggccucaacuggaucaccaaggugaucaugggggccgugcugaucugggucggcaucaacacgcgcaacaugaccauguccaugagcaugauccucgugggggugaucaugauguuccugagccugggcgucggggcggaccagggcugcgccaucaacuucggcaagugaggacuaguuauaagacugacuagcccgaugggccucccaacgggcccuccuccccuccuugcaccgagauuaaucaaaggcucuuuucagagccaccaaaaaaaaaaaaaaaaaaaaaaaaaaaaaaaaaaaaaaaaaaaaaaaaaaaaaaaaaaaaaaaaagaauu

SEQ ID NO: 2137 - RNA, 2246 nt, Artificial Sequence
  mRNA product Design i-3 (hSL-A64-N5) comprising derived and/or modified sequence from YFV__NC_002031.1__X-SS-prME (polyprotein: aa92-778) (opt1)
gggagaaagcuuaccaugcggggccugagcucccgcaagcggcgcagccacgacgugcucaccguccaguuccugauccuggggaugcuccugaugaccggcggggugacgcuggugcggaagaaccgcuggcuccugcugaacgucaccuccgaggaccucggcaagaccuucagcguggggaccggcaacugcacgaccaacauccuggaggccaaguacuggugccccgacuccauggaguacaacugccccaaccugagcccccgggaggagcccgacgacaucgacugcuggugcuacggcguggagaacguccgcguggccuacgggaagugcgacuccgcgggccggagccgccggucccgccgggccaucgaccuccccacccacgagaaccacgggcugaagacccgccaggagaaguggaugacgggccggaugggggagcgccagcugcagaagaucgagcggugguucgugcgcaacccguucuucgccgucaccgcccucaccaucgccuaccuggugggcagcaacaugacccagcggguggucaucgcgcugcucgugcuggccgugggccccgccuacuccgcccacugcaucgggaucacggaccgcgacuucaucgagggcguccacgggggcaccugggugagcgcgacccuggagcaggacaagugcgugaccgucauggcccccgacaagcccucccucgacaucagccuggagacgguggccaucgaccggccggccgaggugcgcaaggucugcuacaacgccgugcugacccacgugaagaucaacgacaagugccccuccaccggcgaggcgcaccucgccgaggagaacgagggggacaacgccugcaagcggaccuacagcgaccggggcugggggaacggcugcgggcuguucggcaagggcuccaucgucgccugcgccaaguucacgugcgcgaaguccaugagccuguucgagguggaccagaccaagauccaguacgucauccgcgcccagcuccacgugggggccaagcaggagaacuggaacaccgacaucaagacccugaaguucgacgcccugagcggcagccaggagguggaguucaucggguacggcaaggccacgcucgagugccagguccagaccgcgguggacuucgggaacuccuacaucgccgagauggagaccgagagcuggaucguggaccggcagugggcccaggaccugacccugcccuggcaguccggcagcggcggggucuggcgcgagaugcaccaccucguggaguucgagcccccgcacgccgccacgauccgggugcuggcgcugggcaaccaggaggggucccucaagaccgcccugaccggcgccaugcgcgucaccaaggacacgaacgacaacaaccuguacaagcuccacgggggccacgugagcugccgggugaagcuguccgcccugacccucaagggcaccagcuacaagaucugcaccgacaagauguucuucgucaagaaccccacggacaccgggcacggcaccguggugaugcaggucaagguguccaagggggcgcccugccgcaucccggugaucgucgccgacgaccugaccgccgccaucaacaagggcauccuggugaccgugaacccgaucgccagcacgaacgacgacgagguccucaucgaggugaacccgcccuucggcgacuccuacaucaucguggggcggggcgacagccgccugaccuaccaguggcacaaggagggguccagcaucggcaagcuguucacccagaccaugaagggggucgagcggcuggcggugaugggcgacacggccugggacuucuccagcgccggcggguucuucaccuccgugggcaaggggauccacaccgucuucggcagcgccuuccaggggcuguucggcggccucaacuggaucaccaaggugaucaugggggccgugcugaucugggucggcaucaacacgcgcaacaugaccauguccaugagcaugauccucgugggggugaucaugauguuccugagccugggcgucggggcgugaggacuaguuauaagacugacuagcccgaugggccucccaacgggcccuccuccccuccuugcaccgagauuaaucaaaggcucuuuucagagccaccaaaaaaaaaaaaaaaaaaaaaaaaaaaaaaaaaaaaaaaaaaaaaaaaaaaaaaaaaaaaaaaaagaauu

SEQ ID NO: 2138 - RNA, 2249 nt, Artificial Sequence
  mRNA product Design i-3 (hSL-A64-N5) comprising derived and/or modified sequence from YFV__NC_002031.1__SSjev(V3)-prME-XX (polyprotein: aa122-788) (opt1)
gggagaaagcuuaccaugaacgagggcagcaucauguggcuggccucccucgccguggucaucgcgugcgccggggccgugacgcuggugcggaagaaccgcuggcuccugcugaacgucaccuccgaggaccucggcaagaccuucagcguggggaccggcaacugcacgaccaacauccuggaggccaaguacuggugccccgacuccauggaguacaacugccccaaccugagcccccgggaggagcccgacgacaucgacugcuggugcuacggcguggagaacguccgcguggccuacgggaagugcgacuccgcgggccggagccgccggucccgccgggccaucgaccuccccacccacgagaaccacgggcugaagacccgccaggagaaguggaugacgggccggaugggggagcgccagcugcagaagaucgagcggugguucgugcgcaacccguucuucgccgucaccgcccucaccaucgccuaccuggugggcagcaacaugacccagcggguggucaucgcgcugcucgugcuggccgugggccccgccuacuccgcccacugcaucgggaucacggaccgcgacuucaucgagggcguccacgggggcaccugggugagcgcgacccuggagcaggacaagugcgugaccgucauggcccccgacaagcccucccucgacaucagccuggagacgguggccaucgaccggccggccgaggugcgcaaggucugcuacaacgccgugcugacccacgugaagaucaacgacaagugccccuccaccggcgaggcgcaccucgccgaggagaacgagggggacaacgccugcaagcggaccuacagcgaccggggcugggggaacggcugcgggcuguucggcaagggcuccaucgucgccugcgccaaguucacgugcgcgaaguccaugagccuguucgagguggaccagaccaagauccaguacgucauccgcgcccagcuccacgugggggccaagcaggagaacuggaacaccgacaucaagacccugaaguucgacgcccugagcggcagccaggagguggaguucaucggguacggcaaggccacgcucgagugccagguccagaccgcgguggacuucgggaacuccuacaucgccgagauggagaccgagagcuggaucguggaccggcagugggcccaggaccugacccugcccuggcaguccggcagcggcggggucuggcgcgagaugcaccaccucguggaguucgagcccccgcacgccgccacgauccgggugcuggcgcugggcaaccaggaggggucccucaagaccgcccugaccggcgccaugcgcgucaccaaggacacgaacgacaacaaccuguacaagcuccacgggggccacgugagcugccgggugaagcuguccgcccugacccucaagggcaccagcuacaagaucugcaccgacaagauguucuucgucaagaaccccacggacaccgggcacggcaccguggugaugcaggucaagguguccaagggggcgcccugccgcaucccggugaucgucgccgacgaccugaccgccgccaucaacaagggcauccuggugaccgugaacccgaucgccagcacgaacgacgacgagguccucaucgaggugaacccgcccuucggcgacuccuacaucaucguggggcggggcgacagccgccugaccuaccaguggcacaaggagggguccagcaucggcaagcuguucacccagaccaugaagggggucgagcggcuggcggugaugggcgacacggccugggacuucuccagcgccggcggguucuucaccuccgugggcaaggggauccacaccgucuucggcagcgccuuccaggggcuguucggcggccucaacuggaucaccaaggugaucaugggggccgugcugaucugggucggcaucaacacgcgcaacaugaccauguccaugagcaugauccucgugggggugaucaugauguuccugagccugggcgucggggcggaccagggcugcgccaucaacuucggcaagugaggacuaguuauaagacugacuagcccgaugggccucccaacgggcccuccuccccuccuugcaccgagauuaaucaaaggcucuuuucagagccaccaaaaaaaaaaaaaaaaaaaaaaaaaaaaaaaaaaaaaaaaaaaaaaaaaaaaaaaaaaaaaaaaagaauu

SEQ ID NO: 2139 - RNA, 2258 nt, Artificial Sequence
  mRNA product Design i-3 (hSL-A64-N5) comprising derived and/or modified sequence from YFV__NC_002031.1__X-SS-prMEdelstem_TM-JEV (polyprotein: aa92-681) (opt1)
gggagaaagcuuaccaugcggggccugagcucccgcaagcggcgcagccacgacgugcucaccguccaguuccugauccuggggaugcuccugaugaccggcggggugacgcuggugcggaagaaccgcuggcuccugcugaacgucaccuccgaggaccucggcaagaccuucagcguggggaccggcaacugcacgaccaacauccuggaggccaaguacuggugccccgacuccauggaguacaacugccccaaccugagcccccgggaggagcccgacgacaucgacugcuggugcuacggcguggagaacguccgcguggccuacgggaagugcgacuccgcgggccggagccgccggucccgccgggccaucgaccuccccacccacgagaaccacgggcugaagacccgccaggagaaguggaugacgggccggaugggggagcgccagcugcagaagaucgagcggugguucgugcgcaacccguucuucgccgucaccgcccucaccaucgccuaccuggugggcagcaacaugacccagcggguggucaucgcgcugcucgugcuggccgugggccccgccuacuccgcccacugcaucgggaucacggaccgcgacuucaucgagggcguccacgggggcaccugggugagcgcgacccuggagcaggacaagugcgugaccgucauggcccccgacaagcccucccucgacaucagccuggagacgguggccaucgaccggccggccgaggugcgcaaggucugcuacaacgccgugcugacccacgugaagaucaacgacaagugccccuccaccggcgaggcgcaccucgccgaggagaacgagggggacaacgccugcaagcggaccuacagcgaccggggcugggggaacggcugcgggcuguucggcaagggcuccaucgucgccugcgccaaguucacgugcgcgaaguccaugagccuguucgagguggaccagaccaagauccaguacgucauccgcgcccagcuccacgugggggccaagcaggagaacuggaacaccgacaucaagacccugaaguucgacgcccugagcggcagccaggagguggaguucaucggguacggcaaggccacgcucgagugccagguccagaccgcgguggacuucgggaacuccuacaucgccgagauggagaccgagagcuggaucguggaccggcagugggcccaggaccugacccugcccuggcaguccggcagcggcggggucuggcgcgagaugcaccaccucguggaguucgagcccccgcacgccgccacgauccgggugcuggcgcugggcaaccaggaggggucccucaagaccgcccugaccggcgccaugcgcgucaccaaggacacgaacgacaacaaccuguacaagcuccacgggggccacgugagcugccgggugaagcuguccgcccugacccucaagggcaccagcuacaagaucugcaccgacaagauguucuucgucaagaaccccacggacaccgggcacggcaccguggugaugcaggucaagguguccaagggggcgcccugccgcaucccggugaucgucgccgacgaccugaccgccgccaucaacaagggcauccuggugaccgugaacccgaucgccagcacgaacgacgacgagguccucaucgaggugaacccgcccuucggcgacuccuacaucaucguggggcggggcgacagccgccugaccuaccaguggcacaaggagggguccagcaucggaagcacgcugggcaaggccuuuucaacaacuuugaagggagcucaaagacuggcagcguugggcgacacagccugggacuuuggcucuauuggaggggucuucaacuccauagguagagccguucaccaaguguuuggaggugccuucagaacacucuuugggggaaugucuuggaucacacaagggcuaaugggugcccuacugcucuggaugggcgucaacgcacgagaccgaucaauugcuuuggccuucuuagccacaggaggugugcucguguucuuagcgaccaaugugcacgccugaggacuaguuauaagacugacuagcccgaugggccucccaacgggcccuccuccccuccuugcaccgagauuaaucaaaggcucuuuucagagccaccaaaaaaaaaaaaaaaaaaaaaaaaaaaaaaaaaaaaaaaaaaaaaaaaaaaaaaaaaaaaaaaaagaauu

SEQ ID NO: 2140 - RNA, 2231 nt, Artificial Sequence
  mRNA product Design i-3 (hSL-A64-N5) comprising derived and/or modified sequence from YFV__NC_002031.1__SSjev(V3)-prMEdelstem_TM-JEV (polyprotein: aa122-681) (opt1)
gggagaaagcuuaccaugaacgagggcagcaucauguggcuggccucccucgccguggucaucgcgugcgccggggccgugacgcuggugcggaagaaccgcuggcuccugcugaacgucaccuccgaggaccucggcaagaccuucagcguggggaccggcaacugcacgaccaacauccuggaggccaaguacuggugccccgacuccauggaguacaacugccccaaccugagcccccgggaggagcccgacgacaucgacugcuggugcuacggcguggagaacguccgcguggccuacgggaagugcgacuccgcgggccggagccgccggucccgccgggccaucgaccuccccacccacgagaaccacgggcugaagacccgccaggagaaguggaugacgggccggaugggggagcgccagcugcagaagaucgagcggugguucgugcgcaacccguucuucgccgucaccgcccucaccaucgccuaccuggugggcagcaacaugacccagcggguggucaucgcgcugcucgugcuggccgugggccccgccuacuccgcccacugcaucgggaucacggaccgcgacuucaucgagggcguccacgggggcaccugggugagcgcgacccuggagcaggacaagugcgugaccgucauggcccccgacaagcccucccucgacaucagccuggagacgguggccaucgaccggccggccgaggugcgcaaggucugcuacaacgccgugcugacccacgugaagaucaacgacaagugccccuccaccggcgaggcgcaccucgccgaggagaacgagggggacaacgccugcaagcggaccuacagcgaccggggcugggggaacggcugcgggcuguucggcaagggcuccaucgucgccugcgccaaguucacgugcgcgaaguccaugagccuguucgagguggaccagaccaagauccaguacgucauccgcgcccagcuccacgugggggccaagcaggagaacuggaacaccgacaucaagacccugaaguucgacgcccugagcggcagccaggagguggaguucaucggguacggcaaggccacgcucgagugccagguccagaccgcgguggacuucgggaacuccuacaucgccgagauggagaccgagagcuggaucguggaccggcagugggcccaggaccugacccugcccuggcaguccggcagcggcggggucuggcgcgagaugcaccaccucguggaguucgagcccccgcacgccgccacgauccgggugcuggcgcugggcaaccaggaggggucccucaagaccgcccugaccggcgccaugcgcgucaccaaggacacgaacgacaacaaccuguacaagcuccacgggggccacgugagcugccgggugaagcuguccgcccugacccucaagggcaccagcuacaagaucugcaccgacaagauguucuucgucaagaaccccacggacaccgggcacggcaccguggugaugcaggucaagguguccaagggggcgcccugccgcaucccggugaucgucgccgacgaccugaccgccgccaucaacaagggcauccuggugaccgugaacccgaucgccagcacgaacgacgacgagguccucaucgaggugaacccgcccuucggcgacuccuacaucaucguggggcggggcgacagccgccugaccuaccaguggcacaaggagggguccagcaucggcagcacccuggggaaggccuucuccaccacgcucaagggcgcccagcgccuggcggcccugggggacaccgccugggacuucggcagcaucgggggcguguucaacuccaucggccgggccguccaccagguguucgggggcgccuuccgcacccucuucgggggcaugagcuggaucacccaggggcugaugggcgcgcugcuccuguggaugggggugaacgcccgggaccgcuccaucgcccuggccuuccucgcgacgggcggcguccugguguuccuggccaccaacgugcacgccugaggacuaguuauaagacugacuagcccgaugggccucccaacgggcccuccuccccuccuugcaccgagauuaaucaaaggcucuuuucagagccaccaaaaaaaaaaaaaaaaaaaaaaaaaaaaaaaaaaaaaaaaaaaaaaaaaaaaaaaaaaaaaaaaagaauu

SEQ ID NO: 2141 - RNA, 2346 nt, Artificial Sequence
  mRNA product Design a-1 (A64-N5-hSL-N5) comprising derived and/or modified sequence from YFV__NC_002031.1__X-SS-prME-XX (polyprotein: aa92-788) (opt1)
gggagagucccgcagucggcguccagcggcucugcuuguucgugugugugucguugcaggccuuauucaagcuuaccaugcggggccugagcucccgcaagcggcgcagccacgacgugcucaccguccaguuccugauccuggggaugcuccugaugaccggcggggugacgcuggugcggaagaaccgcuggcuccugcugaacgucaccuccgaggaccucggcaagaccuucagcguggggaccggcaacugcacgaccaacauccuggaggccaaguacuggugccccgacuccauggaguacaacugcccgaaccugagcccccgggaggagcccgacgacaucgacugcuggugcuacggcguggagaacguccgcguggccuacgggaagugcgacuccgcgggccggagccgccggucccgccgggccaucgaccuccccacccacgagaaccacgggcugaagacccgccaggagaaguggaugacgggccggaugggggagcgccagcugcagaagaucgagcggugguucgugcgcaacccguucuucgccgucaccgcccucaccaucgccuaccuggugggcagcaacaugacccagcggguggucaucgcgcugcucgugcuggccgugggccccgccuacuccgcccacugcaucgggaucacggaccgcgacuucaucgagggcguccacgggggcaccugggugagcgcgacccuggagcaggacaagugcgugaccgucauggcccccgacaagcccucccucgacaucagccuggagacgguggccaucgaccggccggccgaggugcgcaaggucugcuacaacgccgugcugacccacgugaagaucaacgacaagugccccuccaccggcgaggcgcaccucgccgaggagaacgagggggacaacgccugcaagcggaccuacagcgaccggggcugggggaacggcugcgggcuguucggcaagggcuccaucgucgccugcgccaaguucacgugcgcgaagagcaugucccuguucgagguggaccagaccaagauccaguacgucauccgcgcccagcuccacgugggggccaagcaggagaacuggaacaccgacaucaagacccugaaguucgacgcccugagcggcagccaggagguggaguucaucggguacggcaaggccacgcucgagugccagguccagaccgcgguggacuucgggaacuccuacaucgccgagauggagaccgagagcuggaucguggaccggcagugggcccaggaccugacccugcccuggcaguccggcagcggcggggucuggcgcgagaugcaccaccucguggaguucgagcccccgcacgccgccacgauccgggugcuggcgcugggcaaccaggaggggucccucaagaccgcccugaccggcgccaugcgcgucaccaaggacacgaacgacaacaaccuguacaagcuccacgggggccacgugagcugccgggugaagcuguccgcccugacccucaagggcaccagcuacaagaucugcaccgacaagauguucuucgucaagaaccccacggacaccgggcacggcaccguggugaugcaggucaagguguccaagggggcgcccugccgcaucccggugaucgucgccgacgaccugaccgccgccaucaacaagggcauccuggugaccgugaacccgaucgccagcacgaacgacgacgagguccucaucgaggugaacccccccuucggcgacuccuacaucaucguggggcggggcgacagccgccugaccuaccaguggcacaaggagggguccagcaucggcaagcuguucacccagaccaugaagggggucgagcggcuggcggugaugggcgacacggccugggacuucuccagcgccggcggguucuucaccuccgugggcaaggggauccacaccgucuucggcagcgccuuccaggggcucuucggcggccugaacuggaucaccaaggugaucaugggggccgugcugaucugggucggcaucaacacgcgcaacaugaccauguccaugagcaugauccucgugggggugaucaugauguuccugagccugggcgucggggcggaccagggcugcgccaucaacuucggcaagugaggacuagucccuguucccagagcccacuuuuuuuucuuuuuuugaaauaaaauagccugucuuucauuaauagaucuaaaaaaaaaaaaaaaaaaaaaaaaaaaaaaaaaaaaaaaaaaaaaaaaaaaaaaaaaaaaaaaaugcaucaaaggcucuuuucagagccaccagaauu

SEQ ID NO: 2142 - RNA, 2346 nt, Artificial Sequence
  mRNA product Design a-1 (A64-N5-hSL-N5) comprising derived and/or modified sequence from YFV__NC_002031.1__X-SS-prME-XX (polyprotein: aa92-788) (opt1)
gggagagucccgcagucggcguccagcggcucugcuuguucgugugugugucguugcaggccuuauucaagcuuaccaugcggggccugagcucccgcaagcggcgcagccacgacgugcucaccguccaguuccugauccuggggaugcuccugaugaccggcggggugacgcuggugcggaagaaccgcuggcuccugcugaacgucaccuccgaggaccucggcaagaccuucagcguggggaccggcaacugcacgaccaacauccuggaggccaaguacuggugccccgacuccauggaguacaacugcccgaaccugagcccccgggaggagcccgacgacaucgacugcuggugcuacggcguggagaacguccgcguggccuacgggaagugcgacuccgcgggccggagccgccggucccgccgggccaucgaccuccccacccacgagaaccacgggcugaagacccgccaggagaaguggaugacgggccggaugggggagcgccagcugcagaagaucgagcggugguucgugcgcaacccguucuucgccgucaccgcccucaccaucgccuaccuggugggcagcaacaugacccagcggguggucaucgcgcugcucgugcuggccgugggccccgccuacuccgcccacugcaucgggaucacggaccgcgacuucaucgagggcguccacgggggcaccugggugagcgcgacccuggagcaggacaagugcgugaccgucauggcccccgacaagcccucccucgacaucagccuggagacgguggccaucgaccggccggccgaggugcgcaaggucugcuacaacgccgugcugacccacgugaagaucaacgacaagugccccuccaccggcgaggcgcaccucgccgaggagaacgagggggacaacgccugcaagcggaccuacagcgaccggggcugggggaacggcugcgggcuguucggcaagggcuccaucgucgccugcgccaaguucacgugcgcgaaguccaugagccuguucgagguggaccagaccaagauccaguacgucauccgcgcccagcuccacgugggggccaagcaggagaacuggaacaccgacaucaagacccugaaguucgacgcccugagcggcagccaggagguggaguucaucggguacggcaaggccacgcucgagugccagguccagaccgcgguggacuucgggaacuccuacaucgccgagauggagaccgagagcuggaucguggaccggcagugggcccaggaccugacccugcccuggcaguccggcagcggcggggucuggcgcgagaugcaccaccucguggaguucgagcccccgcacgccgccacgauccgggugcuggcgcugggcaaccaggaggggucccucaagaccgcccugaccggcgccaugcgcgucaccaaggacacgaacgacaacaaccuguacaagcuccacgggggccacgugagcugccgggugaagcuguccgcccugacccucaagggcaccagcuacaagaucugcaccgacaagauguucuucgucaagaaccccacggacaccgggcacggcaccguggugaugcaggucaagguguccaagggggcgcccugccgcaucccggugaucgucgccgacgaccugaccgccgccaucaacaagggcauccuggugaccgugaacccgaucgccagcacgaacgacgacgagguccucaucgaggugaacccccccuucggcgacuccuacaucaucguggggcggggcgacagccgccugaccuaccaguggcacaaggagggguccagcaucggcaagcuguucacccagaccaugaagggggucgagcggcuggcggugaugggcgacacggccugggacuucuccagcgccggcggguucuucaccuccgugggcaaggggauccacaccgucuucggcagcgccuuccaggggcuguucggcggccucaacuggaucaccaaggugaucaugggggccgugcugaucugggucggcaucaacacgcgcaacaugaccauguccaugagcaugauccucgugggggugaucaugauguuccugagccugggcgucggggcggaccagggcugcgccaucaacuucggcaagugaggacuagucccuguucccagagcccacuuuuuuuucuuuuuuugaaauaaaauagccugucuuucauuaauagaucuaaaaaaaaaaaaaaaaaaaaaaaaaaaaaaaaaaaaaaaaaaaaaaaaaaaaaaaaaaaaaaaaugcaucaaaggcucuuuucagagccaccagaauu

SEQ ID NO: 2143 - RNA, 2316 nt, Artificial Sequence
  mRNA product Design a-1 (A64-N5-hSL-N5) comprising derived and/or modified sequence from YFV__NC_002031.1__X-SS-prME (polyprotein: aa92-778) (opt1)
gggagagucccgcagucggcguccagcggcucugcuuguucgugugugugucguugcaggccuuauucaagcuuaccaugcggggccugagcucccgcaagcggcgcagccacgacgugcucaccguccaguuccugauccuggggaugcuccugaugaccggcggggugacgcuggugcggaagaaccgcuggcuccugcugaacgucaccuccgaggaccucggcaagaccuucagcguggggaccggcaacugcacgaccaacauccuggaggccaaguacuggugccccgacuccauggaguacaacugccccaaccugagcccccgggaggagcccgacgacaucgacugcuggugcuacggcguggagaacguccgcguggccuacgggaagugcgacuccgcgggccggagccgccggucccgccgggccaucgaccuccccacccacgagaaccacgggcugaagacccgccaggagaaguggaugacgggccggaugggggagcgccagcugcagaagaucgagcggugguucgugcgcaacccguucuucgccgucaccgcccucaccaucgccuaccuggugggcagcaacaugacccagcggguggucaucgcgcugcucgugcuggccgugggccccgccuacuccgcccacugcaucgggaucacggaccgcgacuucaucgagggcguccacgggggcaccugggugagcgcgacccuggagcaggacaagugcgugaccgucauggcccccgacaagcccucccucgacaucagccuggagacgguggccaucgaccggccggccgaggugcgcaaggucugcuacaacgccgugcugacccacgugaagaucaacgacaagugccccuccaccggcgaggcgcaccucgccgaggagaacgagggggacaacgccugcaagcggaccuacagcgaccggggcugggggaacggcugcgggcuguucggcaagggcuccaucgucgccugcgccaaguucacgugcgcgaaguccaugagccuguucgagguggaccagaccaagauccaguacgucauccgcgcccagcuccacgugggggccaagcaggagaacuggaacaccgacaucaagacccugaaguucgacgcccugagcggcagccaggagguggaguucaucggguacggcaaggccacgcucgagugccagguccagaccgcgguggacuucgggaacuccuacaucgccgagauggagaccgagagcuggaucguggaccggcagugggcccaggaccugacccugcccuggcaguccggcagcggcggggucuggcgcgagaugcaccaccucguggaguucgagcccccgcacgccgccacgauccgggugcuggcgcugggcaaccaggaggggucccucaagaccgcccugaccggcgccaugcgcgucaccaaggacacgaacgacaacaaccuguacaagcuccacgggggccacgugagcugccgggugaagcuguccgcccugacccucaagggcaccagcuacaagaucugcaccgacaagauguucuucgucaagaaccccacggacaccgggcacggcaccguggugaugcaggucaagguguccaagggggcgcccugccgcaucccggugaucgucgccgacgaccugaccgccgccaucaacaagggcauccuggugaccgugaacccgaucgccagcacgaacgacgacgagguccucaucgaggugaacccgcccuucggcgacuccuacaucaucguggggcggggcgacagccgccugaccuaccaguggcacaaggagggguccagcaucggcaagcuguucacccagaccaugaagggggucgagcggcuggcggugaugggcgacacggccugggacuucuccagcgccggcggguucuucaccuccgugggcaaggggauccacaccgucuucggcagcgccuuccaggggcuguucggcggccucaacuggaucaccaaggugaucaugggggccgugcugaucugggucggcaucaacacgcgcaacaugaccauguccaugagcaugauccucgugggggugaucaugauguuccugagccugggcgucggggcgugaggacuagucccuguucccagagcccacuuuuuuuucuuuuuuugaaauaaaauagccugucuuucauuaauagaucuaaaaaaaaaaaaaaaaaaaaaaaaaaaaaaaaaaaaaaaaaaaaaaaaaaaaaaaaaaaaaaaaugcaucaaaggcucuuuucagagccaccagaauu

SEQ ID NO: 2144 - RNA, 2319 nt, Artificial Sequence
  mRNA product Design a-1 (A64-N5-hSL-N5) comprising derived and/or modified sequence from YFV__NC_002031.1__SSjev(V3)-prME-XX (polyprotein: aa122-788) (opt1)
gggagagucccgcagucggcguccagcggcucugcuuguucgugugugugucguugcaggccuuauucaagcuuaccaugaacgagggcagcaucauguggcuggccucccucgccguggucaucgcgugcgccggggccgugacgcuggugcggaagaaccgcuggcuccugcugaacgucaccuccgaggaccucggcaagaccuucagcguggggaccggcaacugcacgaccaacauccuggaggccaaguacuggugccccgacuccauggaguacaacugccccaaccugagcccccgggaggagcccgacgacaucgacugcuggugcuacggcguggagaacguccgcguggccuacgggaagugcgacuccgcgggccggagccgccggucccgccgggccaucgaccuccccacccacgagaaccacgggcugaagacccgccaggagaaguggaugacgggccggaugggggagcgccagcugcagaagaucgagcggugguucgugcgcaacccguucuucgccgucaccgcccucaccaucgccuaccuggugggcagcaacaugacccagcggguggucaucgcgcugcucgugcuggccgugggccccgccuacuccgcccacugcaucgggaucacggaccgcgacuucaucgagggcguccacgggggcaccugggugagcgcgacccuggagcaggacaagugcgugaccgucauggcccccgacaagcccucccucgacaucagccuggagacgguggccaucgaccggccggccgaggugcgcaaggucugcuacaacgccgugcugacccacgugaagaucaacgacaagugccccuccaccggcgaggcgcaccucgccgaggagaacgagggggacaacgccugcaagcggaccuacagcgaccggggcugggggaacggcugcgggcuguucggcaagggcuccaucgucgccugcgccaaguucacgugcgcgaaguccaugagccuguucgagguggaccagaccaagauccaguacgucauccgcgcccagcuccacgugggggccaagcaggagaacuggaacaccgacaucaagacccugaaguucgacgcccugagcggcagccaggagguggaguucaucggguacggcaaggccacgcucgagugccagguccagaccgcgguggacuucgggaacuccuacaucgccgagauggagaccgagagcuggaucguggaccggcagugggcccaggaccugacccugcccuggcaguccggcagcggcggggucuggcgcgagaugcaccaccucguggaguucgagcccccgcacgccgccacgauccgggugcuggcgcugggcaaccaggaggggucccucaagaccgcccugaccggcgccaugcgcgucaccaaggacacgaacgacaacaaccuguacaagcuccacgggggccacgugagcugccgggugaagcuguccgcccugacccucaagggcaccagcuacaagaucugcaccgacaagauguucuucgucaagaaccccacggacaccgggcacggcaccguggugaugcaggucaagguguccaagggggcgcccugccgcaucccggugaucgucgccgacgaccugaccgccgccaucaacaagggcauccuggugaccgugaacccgaucgccagcacgaacgacgacgagguccucaucgaggugaacccgcccuucggcgacuccuacaucaucguggggcggggcgacagccgccugaccuaccaguggcacaaggagggguccagcaucggcaagcuguucacccagaccaugaagggggucgagcggcuggcggugaugggcgacacggccugggacuucuccagcgccggcggguucuucaccuccgugggcaaggggauccacaccgucuucggcagcgccuuccaggggcuguucggcggccucaacuggaucaccaaggugaucaugggggccgugcugaucugggucggcaucaacacgcgcaacaugaccauguccaugagcaugauccucgugggggugaucaugauguuccugagccugggcgucggggcggaccagggcugcgccaucaacuucggcaagugaggacuagucccuguucccagagcccacuuuuuuuucuuuuuuugaaauaaaauagccugucuuucauuaauagaucuaaaaaaaaaaaaaaaaaaaaaaaaaaaaaaaaaaaaaaaaaaaaaaaaaaaaaaaaaaaaaaaaugcaucaaaggcucuuuucagagccaccagaauu

SEQ ID NO: 2145 - RNA, 2328 nt, Artificial Sequence
  mRNA product Design a-1 (A64-N5-hSL-N5) comprising derived and/or modified sequence from YFV__NC_002031.1__X-SS-prMEdelstem_TM-JEV (polyprotein: aa92-681) (opt1)
gggagagucccgcagucggcguccagcggcucugcuuguucgugugugugucguugcaggccuuauucaagcuuaccaugcggggccugagcucccgcaagcggcgcagccacgacgugcucaccguccaguuccugauccuggggaugcuccugaugaccggcggggugacgcuggugcggaagaaccgcuggcuccugcugaacgucaccuccgaggaccucggcaagaccuucagcguggggaccggcaacugcacgaccaacauccuggaggccaaguacuggugccccgacuccauggaguacaacugccccaaccugagcccccgggaggagcccgacgacaucgacugcuggugcuacggcguggagaacguccgcguggccuacgggaagugcgacuccgcgggccggagccgccggucccgccgggccaucgaccuccccacccacgagaaccacgggcugaagacccgccaggagaaguggaugacgggccggaugggggagcgccagcugcagaagaucgagcggugguucgugcgcaacccguucuucgccgucaccgcccucaccaucgccuaccuggugggcagcaacaugacccagcggguggucaucgcgcugcucgugcuggccgugggccccgccuacuccgcccacugcaucgggaucacggaccgcgacuucaucgagggcguccacgggggcaccugggugagcgcgacccuggagcaggacaagugcgugaccgucauggcccccgacaagcccucccucgacaucagccuggagacgguggccaucgaccggccggccgaggugcgcaaggucugcuacaacgccgugcugacccacgugaagaucaacgacaagugccccuccaccggcgaggcgcaccucgccgaggagaacgagggggacaacgccugcaagcggaccuacagcgaccggggcugggggaacggcugcgggcuguucggcaagggcuccaucgucgccugcgccaaguucacgugcgcgaaguccaugagccuguucgagguggaccagaccaagauccaguacgucauccgcgcccagcuccacgugggggccaagcaggagaacuggaacaccgacaucaagacccugaaguucgacgcccugagcggcagccaggagguggaguucaucggguacggcaaggccacgcucgagugccagguccagaccgcgguggacuucgggaacuccuacaucgccgagauggagaccgagagcuggaucguggaccggcagugggcccaggaccugacccugcccuggcaguccggcagcggcggggucuggcgcgagaugcaccaccucguggaguucgagcccccgcacgccgccacgauccgggugcuggcgcugggcaaccaggaggggucccucaagaccgcccugaccggcgccaugcgcgucaccaaggacacgaacgacaacaaccuguacaagcuccacgggggccacgugagcugccgggugaagcuguccgcccugacccucaagggcaccagcuacaagaucugcaccgacaagauguucuucgucaagaaccccacggacaccgggcacggcaccguggugaugcaggucaagguguccaagggggcgcccugccgcaucccggugaucgucgccgacgaccugaccgccgccaucaacaagggcauccuggugaccgugaacccgaucgccagcacgaacgacgacgagguccucaucgaggugaacccgcccuucggcgacuccuacaucaucguggggcggggcgacagccgccugaccuaccaguggcacaaggagggguccagcaucggaagcacgcugggcaaggccuuuucaacaacuuugaagggagcucaaagacuggcagcguugggcgacacagccugggacuuuggcucuauuggaggggucuucaacuccauagguagagccguucaccaaguguuuggaggugccuucagaacacucuuugggggaaugucuuggaucacacaagggcuaaugggugcccuacugcucuggaugggcgucaacgcacgagaccgaucaauugcuuuggccuucuuagccacaggaggugugcucguguucuuagcgaccaaugugcacgccugaggacuagucccuguucccagagcccacuuuuuuuucuuuuuuugaaauaaaauagccugucuuucauuaauagaucuaaaaaaaaaaaaaaaaaaaaaaaaaaaaaaaaaaaaaaaaaaaaaaaaaaaaaaaaaaaaaaaaugcaucaaaggcucuuuucagagccaccagaauu

SEQ ID NO: 2146 - RNA, 2301 nt, Artificial Sequence
  mRNA product Design a-1 (A64-N5-hSL-N5) comprising derived and/or modified sequence from YFV__NC_002031.1__SSjev(V3)-prMEdelstem_TM-JEV (polyprotein: aa122-681) (opt1)
gggagagucccgcagucggcguccagcggcucugcuuguucgugugugugucguugcaggccuuauucaagcuuaccaugaacgagggcagcaucauguggcuggccucccucgccguggucaucgcgugcgccggggccgugacgcuggugcggaagaaccgcuggcuccugcugaacgucaccuccgaggaccucggcaagaccuucagcguggggaccggcaacugcacgaccaacauccuggaggccaaguacuggugccccgacuccauggaguacaacugccccaaccugagcccccgggaggagcccgacgacaucgacugcuggugcuacggcguggagaacguccgcguggccuacgggaagugcgacuccgcgggccggagccgccggucccgccgggccaucgaccuccccacccacgagaaccacgggcugaagacccgccaggagaaguggaugacgggccggaugggggagcgccagcugcagaagaucgagcggugguucgugcgcaacccguucuucgccgucaccgcccucaccaucgccuaccuggugggcagcaacaugacccagcggguggucaucgcgcugcucgugcuggccgugggccccgccuacuccgcccacugcaucgggaucacggaccgcgacuucaucgagggcguccacgggggcaccugggugagcgcgacccuggagcaggacaagugcgugaccgucauggcccccgacaagcccucccucgacaucagccuggagacgguggccaucgaccggccggccgaggugcgcaaggucugcuacaacgccgugcugacccacgugaagaucaacgacaagugccccuccaccggcgaggcgcaccucgccgaggagaacgagggggacaacgccugcaagcggaccuacagcgaccggggcugggggaacggcugcgggcuguucggcaagggcuccaucgucgccugcgccaaguucacgugcgcgaaguccaugagccuguucgagguggaccagaccaagauccaguacgucauccgcgcccagcuccacgugggggccaagcaggagaacuggaacaccgacaucaagacccugaaguucgacgcccugagcggcagccaggagguggaguucaucggguacggcaaggccacgcucgagugccagguccagaccgcgguggacuucgggaacuccuacaucgccgagauggagaccgagagcuggaucguggaccggcagugggcccaggaccugacccugcccuggcaguccggcagcggcggggucuggcgcgagaugcaccaccucguggaguucgagcccccgcacgccgccacgauccgggugcuggcgcugggcaaccaggaggggucccucaagaccgcccugaccggcgccaugcgcgucaccaaggacacgaacgacaacaaccuguacaagcuccacgggggccacgugagcugccgggugaagcuguccgcccugacccucaagggcaccagcuacaagaucugcaccgacaagauguucuucgucaagaaccccacggacaccgggcacggcaccguggugaugcaggucaagguguccaagggggcgcccugccgcaucccggugaucgucgccgacgaccugaccgccgccaucaacaagggcauccuggugaccgugaacccgaucgccagcacgaacgacgacgagguccucaucgaggugaacccgcccuucggcgacuccuacaucaucguggggcggggcgacagccgccugaccuaccaguggcacaaggagggguccagcaucggcagcacccuggggaaggccuucuccaccacgcucaagggcgcccagcgccuggcggcccugggggacaccgccugggacuucggcagcaucgggggcguguucaacuccaucggccgggccguccaccagguguucgggggcgccuuccgcacccucuucgggggcaugagcuggaucacccaggggcugaugggcgcgcugcuccuguggaugggggugaacgcccgggaccgcuccaucgcccuggccuuccucgcgacgggcggcguccugguguuccuggccaccaacgugcacgccugaggacuagucccuguucccagagcccacuuuuuuuucuuuuuuugaaauaaaauagccugucuuucauuaauagaucuaaaaaaaaaaaaaaaaaaaaaaaaaaaaaaaaaaaaaaaaaaaaaaaaaaaaaaaaaaaaaaaaugcaucaaaggcucuuuucagagccaccagaauu

SEQ ID NO: 2147 - RNA, 2287 nt, Artificial Sequence
  mRNA product Design i-3 (A64-N5-hSL-N5) comprising derived and/or modified sequence from YFV__NC_002031.1__X-SS-prME-XX (polyprotein: aa92-788) (opt1)
gggagaaagcuuaccaugcggggccugagcucccgcaagcggcgcagccacgacgugcucaccguccaguuccugauccuggggaugcuccugaugaccggcggggugacgcuggugcggaagaaccgcuggcuccugcugaacgucaccuccgaggaccucggcaagaccuucagcguggggaccggcaacugcacgaccaacauccuggaggccaaguacuggugccccgacuccauggaguacaacugcccgaaccugagcccccgggaggagcccgacgacaucgacugcuggugcuacggcguggagaacguccgcguggccuacgggaagugcgacuccgcgggccggagccgccggucccgccgggccaucgaccuccccacccacgagaaccacgggcugaagacccgccaggagaaguggaugacgggccggaugggggagcgccagcugcagaagaucgagcggugguucgugcgcaacccguucuucgccgucaccgcccucaccaucgccuaccuggugggcagcaacaugacccagcggguggucaucgcgcugcucgugcuggccgugggccccgccuacuccgcccacugcaucgggaucacggaccgcgacuucaucgagggcguccacgggggcaccugggugagcgcgacccuggagcaggacaagugcgugaccgucauggcccccgacaagcccucccucgacaucagccuggagacgguggccaucgaccggccggccgaggugcgcaaggucugcuacaacgccgugcugacccacgugaagaucaacgacaagugccccuccaccggcgaggcgcaccucgccgaggagaacgagggggacaacgccugcaagcggaccuacagcgaccggggcugggggaacggcugcgggcuguucggcaagggcuccaucgucgccugcgccaaguucacgugcgcgaagagcaugucccuguucgagguggaccagaccaagauccaguacgucauccgcgcccagcuccacgugggggccaagcaggagaacuggaacaccgacaucaagacccugaaguucgacgcccugagcggcagccaggagguggaguucaucggguacggcaaggccacgcucgagugccagguccagaccgcgguggacuucgggaacuccuacaucgccgagauggagaccgagagcuggaucguggaccggcagugggcccaggaccugacccugcccuggcaguccggcagcggcggggucuggcgcgagaugcaccaccucguggaguucgagcccccgcacgccgccacgauccgggugcuggcgcugggcaaccaggaggggucccucaagaccgcccugaccggcgccaugcgcgucaccaaggacacgaacgacaacaaccuguacaagcuccacgggggccacgugagcugccgggugaagcuguccgcccugacccucaagggcaccagcuacaagaucugcaccgacaagauguucuucgucaagaaccccacggacaccgggcacggcaccguggugaugcaggucaagguguccaagggggcgcccugccgcaucccggugaucgucgccgacgaccugaccgccgccaucaacaagggcauccuggugaccgugaacccgaucgccagcacgaacgacgacgagguccucaucgaggugaacccccccuucggcgacuccuacaucaucguggggcggggcgacagccgccugaccuaccaguggcacaaggagggguccagcaucggcaagcuguucacccagaccaugaagggggucgagcggcuggcggugaugggcgacacggccugggacuucuccagcgccggcggguucuucaccuccgugggcaaggggauccacaccgucuucggcagcgccuuccaggggcucuucggcggccugaacuggaucaccaaggugaucaugggggccgugcugaucugggucggcaucaacacgcgcaacaugaccauguccaugagcaugauccucgugggggugaucaugauguuccugagccugggcgucggggcggaccagggcugcgccaucaacuucggcaagugaggacuaguuauaagacugacuagcccgaugggccucccaacgggcccuccuccccuccuugcaccgagauuaauagaucuaaaaaaaaaaaaaaaaaaaaaaaaaaaaaaaaaaaaaaaaaaaaaaaaaaaaaaaaaaaaaaaaugcaucaaaggcucuuuucagagccaccagaauu

SEQ ID NO: 2148 - RNA, 2287 nt, Artificial Sequence
  mRNA product Design i-3 (A64-N5-hSL-N5) comprising derived and/or modified sequence from YFV__NC_002031.1__X-SS-prME-XX (polyprotein: aa92-788) (opt1)
gggagaaagcuuaccaugcggggccugagcucccgcaagcggcgcagccacgacgugcucaccguccaguuccugauccuggggaugcuccugaugaccggcggggugacgcuggugcggaagaaccgcuggcuccugcugaacgucaccuccgaggaccucggcaagaccuucagcguggggaccggcaacugcacgaccaacauccuggaggccaaguacuggugccccgacuccauggaguacaacugcccgaaccugagcccccgggaggagcccgacgacaucgacugcuggugcuacggcguggagaacguccgcguggccuacgggaagugcgacuccgcgggccggagccgccggucccgccgggccaucgaccuccccacccacgagaaccacgggcugaagacccgccaggagaaguggaugacgggccggaugggggagcgccagcugcagaagaucgagcggugguucgugcgcaacccguucuucgccgucaccgcccucaccaucgccuaccuggugggcagcaacaugacccagcggguggucaucgcgcugcucgugcuggccgugggccccgccuacuccgcccacugcaucgggaucacggaccgcgacuucaucgagggcguccacgggggcaccugggugagcgcgacccuggagcaggacaagugcgugaccgucauggcccccgacaagcccucccucgacaucagccuggagacgguggccaucgaccggccggccgaggugcgcaaggucugcuacaacgccgugcugacccacgugaagaucaacgacaagugccccuccaccggcgaggcgcaccucgccgaggagaacgagggggacaacgccugcaagcggaccuacagcgaccggggcugggggaacggcugcgggcuguucggcaagggcuccaucgucgccugcgccaaguucacgugcgcgaaguccaugagccuguucgagguggaccagaccaagauccaguacgucauccgcgcccagcuccacgugggggccaagcaggagaacuggaacaccgacaucaagacccugaaguucgacgcccugagcggcagccaggagguggaguucaucggguacggcaaggccacgcucgagugccagguccagaccgcgguggacuucgggaacuccuacaucgccgagauggagaccgagagcuggaucguggaccggcagugggcccaggaccugacccugcccuggcaguccggcagcggcggggucuggcgcgagaugcaccaccucguggaguucgagcccccgcacgccgccacgauccgggugcuggcgcugggcaaccaggaggggucccucaagaccgcccugaccggcgccaugcgcgucaccaaggacacgaacgacaacaaccuguacaagcuccacgggggccacgugagcugccgggugaagcuguccgcccugacccucaagggcaccagcuacaagaucugcaccgacaagauguucuucgucaagaaccccacggacaccgggcacggcaccguggugaugcaggucaagguguccaagggggcgcccugccgcaucccggugaucgucgccgacgaccugaccgccgccaucaacaagggcauccuggugaccgugaacccgaucgccagcacgaacgacgacgagguccucaucgaggugaacccccccuucggcgacuccuacaucaucguggggcggggcgacagccgccugaccuaccaguggcacaaggagggguccagcaucggcaagcuguucacccagaccaugaagggggucgagcggcuggcggugaugggcgacacggccugggacuucuccagcgccggcggguucuucaccuccgugggcaaggggauccacaccgucuucggcagcgccuuccaggggcuguucggcggccucaacuggaucaccaaggugaucaugggggccgugcugaucugggucggcaucaacacgcgcaacaugaccauguccaugagcaugauccucgugggggugaucaugauguuccugagccugggcgucggggcggaccagggcugcgccaucaacuucggcaagugaggacuaguuauaagacugacuagcccgaugggccucccaacgggcccuccuccccuccuugcaccgagauuaauagaucuaaaaaaaaaaaaaaaaaaaaaaaaaaaaaaaaaaaaaaaaaaaaaaaaaaaaaaaaaaaaaaaaugcaucaaaggcucuuuucagagccaccagaauu

SEQ ID NO: 2149 - RNA, 2257 nt, Artificial Sequence
  mRNA product Design i-3 (A64-N5-hSL-N5) comprising derived and/or modified sequence from YFV__NC_002031.1__X-SS-prME (polyprotein: aa92-778) (opt1)
gggagaaagcuuaccaugcggggccugagcucccgcaagcggcgcagccacgacgugcucaccguccaguuccugauccuggggaugcuccugaugaccggcggggugacgcuggugcggaagaaccgcuggcuccugcugaacgucaccuccgaggaccucggcaagaccuucagcguggggaccggcaacugcacgaccaacauccuggaggccaaguacuggugccccgacuccauggaguacaacugccccaaccugagcccccgggaggagcccgacgacaucgacugcuggugcuacggcguggagaacguccgcguggccuacgggaagugcgacuccgcgggccggagccgccggucccgccgggccaucgaccuccccacccacgagaaccacgggcugaagacccgccaggagaaguggaugacgggccggaugggggagcgccagcugcagaagaucgagcggugguucgugcgcaacccguucuucgccgucaccgcccucaccaucgccuaccuggugggcagcaacaugacccagcggguggucaucgcgcugcucgugcuggccgugggccccgccuacuccgcccacugcaucgggaucacggaccgcgacuucaucgagggcguccacgggggcaccugggugagcgcgacccuggagcaggacaagugcgugaccgucauggcccccgacaagcccucccucgacaucagccuggagacgguggccaucgaccggccggccgaggugcgcaaggucugcuacaacgccgugcugacccacgugaagaucaacgacaagugccccuccaccggcgaggcgcaccucgccgaggagaacgagggggacaacgccugcaagcggaccuacagcgaccggggcugggggaacggcugcgggcuguucggcaagggcuccaucgucgccugcgccaaguucacgugcgcgaaguccaugagccuguucgagguggaccagaccaagauccaguacgucauccgcgcccagcuccacgugggggccaagcaggagaacuggaacaccgacaucaagacccugaaguucgacgcccugagcggcagccaggagguggaguucaucggguacggcaaggccacgcucgagugccagguccagaccgcgguggacuucgggaacuccuacaucgccgagauggagaccgagagcuggaucguggaccggcagugggcccaggaccugacccugcccuggcaguccggcagcggcggggucuggcgcgagaugcaccaccucguggaguucgagcccccgcacgccgccacgauccgggugcuggcgcugggcaaccaggaggggucccucaagaccgcccugaccggcgccaugcgcgucaccaaggacacgaacgacaacaaccuguacaagcuccacgggggccacgugagcugccgggugaagcuguccgcccugacccucaagggcaccagcuacaagaucugcaccgacaagauguucuucgucaagaaccccacggacaccgggcacggcaccguggugaugcaggucaagguguccaagggggcgcccugccgcaucccggugaucgucgccgacgaccugaccgccgccaucaacaagggcauccuggugaccgugaacccgaucgccagcacgaacgacgacgagguccucaucgaggugaacccgcccuucggcgacuccuacaucaucguggggcggggcgacagccgccugaccuaccaguggcacaaggagggguccagcaucggcaagcuguucacccagaccaugaagggggucgagcggcuggcggugaugggcgacacggccugggacuucuccagcgccggcggguucuucaccuccgugggcaaggggauccacaccgucuucggcagcgccuuccaggggcuguucggcggccucaacuggaucaccaaggugaucaugggggccgugcugaucugggucggcaucaacacgcgcaacaugaccauguccaugagcaugauccucgugggggugaucaugauguuccugagccugggcgucggggcgugaggacuaguuauaagacugacuagcccgaugggccucccaacgggcccuccuccccuccuugcaccgagauuaauagaucuaaaaaaaaaaaaaaaaaaaaaaaaaaaaaaaaaaaaaaaaaaaaaaaaaaaaaaaaaaaaaaaaugcaucaaaggcucuuuucagagccaccagaauu

SEQ ID NO: 2150 - RNA, 2260 nt, Artificial Sequence
  mRNA product Design i-3 (A64-N5-hSL-N5) comprising derived and/or modified sequence from YFV__NC_002031.1__SSjev(V3)-prME-XX (polyprotein: aa122-788) (opt1)
gggagaaagcuuaccaugaacgagggcagcaucauguggcuggccucccucgccguggucaucgcgugcgccggggccgugacgcuggugcggaagaaccgcuggcuccugcugaacgucaccuccgaggaccucggcaagaccuucagcguggggaccggcaacugcacgaccaacauccuggaggccaaguacuggugccccgacuccauggaguacaacugccccaaccugagcccccgggaggagcccgacgacaucgacugcuggugcuacggcguggagaacguccgcguggccuacgggaagugcgacuccgcgggccggagccgccggucccgccgggccaucgaccuccccacccacgagaaccacgggcugaagacccgccaggagaaguggaugacgggccggaugggggagcgccagcugcagaagaucgagcggugguucgugcgcaacccguucuucgccgucaccgcccucaccaucgccuaccuggugggcagcaacaugacccagcggguggucaucgcgcugcucgugcuggccgugggccccgccuacuccgcccacugcaucgggaucacggaccgcgacuucaucgagggcguccacgggggcaccugggugagcgcgacccuggagcaggacaagugcgugaccgucauggcccccgacaagcccucccucgacaucagccuggagacgguggccaucgaccggccggccgaggugcgcaaggucugcuacaacgccgugcugacccacgugaagaucaacgacaagugccccuccaccggcgaggcgcaccucgccgaggagaacgagggggacaacgccugcaagcggaccuacagcgaccggggcugggggaacggcugcgggcuguucggcaagggcuccaucgucgccugcgccaaguucacgugcgcgaaguccaugagccuguucgagguggaccagaccaagauccaguacgucauccgcgcccagcuccacgugggggccaagcaggagaacuggaacaccgacaucaagacccugaaguucgacgcccugagcggcagccaggagguggaguucaucggguacggcaaggccacgcucgagugccagguccagaccgcgguggacuucgggaacuccuacaucgccgagauggagaccgagagcuggaucguggaccggcagugggcccaggaccugacccugcccuggcaguccggcagcggcggggucuggcgcgagaugcaccaccucguggaguucgagcccccgcacgccgccacgauccgggugcuggcgcugggcaaccaggaggggucccucaagaccgcccugaccggcgccaugcgcgucaccaaggacacgaacgacaacaaccuguacaagcuccacgggggccacgugagcugccgggugaagcuguccgcccugacccucaagggcaccagcuacaagaucugcaccgacaagauguucuucgucaagaaccccacggacaccgggcacggcaccguggugaugcaggucaagguguccaagggggcgcccugccgcaucccggugaucgucgccgacgaccugaccgccgccaucaacaagggcauccuggugaccgugaacccgaucgccagcacgaacgacgacgagguccucaucgaggugaacccgcccuucggcgacuccuacaucaucguggggcggggcgacagccgccugaccuaccaguggcacaaggagggguccagcaucggcaagcuguucacccagaccaugaagggggucgagcggcuggcggugaugggcgacacggccugggacuucuccagcgccggcggguucuucaccuccgugggcaaggggauccacaccgucuucggcagcgccuuccaggggcuguucggcggccucaacuggaucaccaaggugaucaugggggccgugcugaucugggucggcaucaacacgcgcaacaugaccauguccaugagcaugauccucgugggggugaucaugauguuccugagccugggcgucggggcggaccagggcugcgccaucaacuucggcaagugaggacuaguuauaagacugacuagcccgaugggccucccaacgggcccuccuccccuccuugcaccgagauuaauagaucuaaaaaaaaaaaaaaaaaaaaaaaaaaaaaaaaaaaaaaaaaaaaaaaaaaaaaaaaaaaaaaaaugcaucaaaggcucuuuucagagccaccagaauu

SEQ ID NO: 2151 - RNA, 2269 nt, Artificial Sequence
  mRNA product Design i-3 (A64-N5-hSL-N5) comprising derived and/or modified sequence from YFV__NC_002031.1__X-SS-prMEdelstem_TM-JEV (polyprotein: aa92-681) (opt1)
gggagaaagcuuaccaugcggggccugagcucccgcaagcggcgcagccacgacgugcucaccguccaguuccugauccuggggaugcuccugaugaccggcggggugacgcuggugcggaagaaccgcuggcuccugcugaacgucaccuccgaggaccucggcaagaccuucagcguggggaccggcaacugcacgaccaacauccuggaggccaaguacuggugccccgacuccauggaguacaacugccccaaccugagcccccgggaggagcccgacgacaucgacugcuggugcuacggcguggagaacguccgcguggccuacgggaagugcgacuccgcgggccggagccgccggucccgccgggccaucgaccuccccacccacgagaaccacgggcugaagacccgccaggagaaguggaugacgggccggaugggggagcgccagcugcagaagaucgagcggugguucgugcgcaacccguucuucgccgucaccgcccucaccaucgccuaccuggugggcagcaacaugacccagcggguggucaucgcgcugcucgugcuggccgugggccccgccuacuccgcccacugcaucgggaucacggaccgcgacuucaucgagggcguccacgggggcaccugggugagcgcgacccuggagcaggacaagugcgugaccgucauggcccccgacaagcccucccucgacaucagccuggagacgguggccaucgaccggccggccgaggugcgcaaggucugcuacaacgccgugcugacccacgugaagaucaacgacaagugccccuccaccggcgaggcgcaccucgccgaggagaacgagggggacaacgccugcaagcggaccuacagcgaccggggcugggggaacggcugcgggcuguucggcaagggcuccaucgucgccugcgccaaguucacgugcgcgaaguccaugagccuguucgagguggaccagaccaagauccaguacgucauccgcgcccagcuccacgugggggccaagcaggagaacuggaacaccgacaucaagacccugaaguucgacgcccugagcggcagccaggagguggaguucaucggguacggcaaggccacgcucgagugccagguccagaccgcgguggacuucgggaacuccuacaucgccgagauggagaccgagagcuggaucguggaccggcagugggcccaggaccugacccugcccuggcaguccggcagcggcggggucuggcgcgagaugcaccaccucguggaguucgagcccccgcacgccgccacgauccgggugcuggcgcugggcaaccaggaggggucccucaagaccgcccugaccggcgccaugcgcgucaccaaggacacgaacgacaacaaccuguacaagcuccacgggggccacgugagcugccgggugaagcuguccgcccugacccucaagggcaccagcuacaagaucugcaccgacaagauguucuucgucaagaaccccacggacaccgggcacggcaccguggugaugcaggucaagguguccaagggggcgcccugccgcaucccggugaucgucgccgacgaccugaccgccgccaucaacaagggcauccuggugaccgugaacccgaucgccagcacgaacgacgacgagguccucaucgaggugaacccgcccuucggcgacuccuacaucaucguggggcggggcgacagccgccugaccuaccaguggcacaaggagggguccagcaucggaagcacgcugggcaaggccuuuucaacaacuuugaagggagcucaaagacuggcagcguugggcgacacagccugggacuuuggcucuauuggaggggucuucaacuccauagguagagccguucaccaaguguuuggaggugccuucagaacacucuuugggggaaugucuuggaucacacaagggcuaaugggugcccuacugcucuggaugggcgucaacgcacgagaccgaucaauugcuuuggccuucuuagccacaggaggugugcucguguucuuagcgaccaaugugcacgccugaggacuaguuauaagacugacuagcccgaugggccucccaacgggcccuccuccccuccuugcaccgagauuaauagaucuaaaaaaaaaaaaaaaaaaaaaaaaaaaaaaaaaaaaaaaaaaaaaaaaaaaaaaaaaaaaaaaaugcaucaaaggcucuuuucagagccaccagaauu

SEQ ID NO: 2152 - RNA, 2242 nt, Artificial Sequence
  mRNA product Design i-3 (A64-N5-hSL-N5) comprising derived and/or modified sequence from YFV__NC_002031.1__SSjev(V3)-prMEdelstem_TM-JEV (polyprotein: aa122-681) (opt1)
gggagaaagcuuaccaugaacgagggcagcaucauguggcuggccucccucgccguggucaucgcgugcgccggggccgugacgcuggugcggaagaaccgcuggcuccugcugaacgucaccuccgaggaccucggcaagaccuucagcguggggaccggcaacugcacgaccaacauccuggaggccaaguacuggugccccgacuccauggaguacaacugccccaaccugagcccccgggaggagcccgacgacaucgacugcuggugcuacggcguggagaacguccgcguggccuacgggaagugcgacuccgcgggccggagccgccggucccgccgggccaucgaccuccccacccacgagaaccacgggcugaagacccgccaggagaaguggaugacgggccggaugggggagcgccagcugcagaagaucgagcggugguucgugcgcaacccguucuucgccgucaccgcccucaccaucgccuaccuggugggcagcaacaugacccagcggguggucaucgcgcugcucgugcuggccgugggccccgccuacuccgcccacugcaucgggaucacggaccgcgacuucaucgagggcguccacgggggcaccugggugagcgcgacccuggagcaggacaagugcgugaccgucauggcccccgacaagcccucccucgacaucagccuggagacgguggccaucgaccggccggccgaggugcgcaaggucugcuacaacgccgugcugacccacgugaagaucaacgacaagugccccuccaccggcgaggcgcaccucgccgaggagaacgagggggacaacgccugcaagcggaccuacagcgaccggggcugggggaacggcugcgggcuguucggcaagggcuccaucgucgccugcgccaaguucacgugcgcgaaguccaugagccuguucgagguggaccagaccaagauccaguacgucauccgcgcccagcuccacgugggggccaagcaggagaacuggaacaccgacaucaagacccugaaguucgacgcccugagcggcagccaggagguggaguucaucggguacggcaaggccacgcucgagugccagguccagaccgcgguggacuucgggaacuccuacaucgccgagauggagaccgagagcuggaucguggaccggcagugggcccaggaccugacccugcccuggcaguccggcagcggcggggucuggcgcgagaugcaccaccucguggaguucgagcccccgcacgccgccacgauccgggugcuggcgcugggcaaccaggaggggucccucaagaccgcccugaccggcgccaugcgcgucaccaaggacacgaacgacaacaaccuguacaagcuccacgggggccacgugagcugccgggugaagcuguccgcccugacccucaagggcaccagcuacaagaucugcaccgacaagauguucuucgucaagaaccccacggacaccgggcacggcaccguggugaugcaggucaagguguccaagggggcgcccugccgcaucccggugaucgucgccgacgaccugaccgccgccaucaacaagggcauccuggugaccgugaacccgaucgccagcacgaacgacgacgagguccucaucgaggugaacccgcccuucggcgacuccuacaucaucguggggcggggcgacagccgccugaccuaccaguggcacaaggagggguccagcaucggcagcacccuggggaaggccuucuccaccacgcucaagggcgcccagcgccuggcggcccugggggacaccgccugggacuucggcagcaucgggggcguguucaacuccaucggccgggccguccaccagguguucgggggcgccuuccgcacccucuucgggggcaugagcuggaucacccaggggcugaugggcgcgcugcuccuguggaugggggugaacgcccgggaccgcuccaucgcccuggccuuccucgcgacgggcggcguccugguguuccuggccaccaacgugcacgccugaggacuaguuauaagacugacuagcccgaugggccucccaacgggcccuccuccccuccuugcaccgagauuaauagaucuaaaaaaaaaaaaaaaaaaaaaaaaaaaaaaaaaaaaaaaaaaaaaaaaaaaaaaaaaaaaaaaaugcaucaaaggcucuuuucagagccaccagaauu

SEQ ID NO: 2153 - RNA, 2366 nt, Artificial Sequence
  mRNA product Design a-1 (hSL-A100) comprising derived and/or modified sequence from YFV__NC_002031.1__X-SS-prME-XX (polyprotein: aa92-788) (opt1)
gggagagucccgcagucggcguccagcggcucugcuuguucgugugugugucguugcaggccuuauucaagcuuaccaugcggggccugagcucccgcaagcggcgcagccacgacgugcucaccguccaguuccugauccuggggaugcuccugaugaccggcggggugacgcuggugcggaagaaccgcuggcuccugcugaacgucaccuccgaggaccucggcaagaccuucagcguggggaccggcaacugcacgaccaacauccuggaggccaaguacuggugccccgacuccauggaguacaacugcccgaaccugagcccccgggaggagcccgacgacaucgacugcuggugcuacggcguggagaacguccgcguggccuacgggaagugcgacuccgcgggccggagccgccggucccgccgggccaucgaccuccccacccacgagaaccacgggcugaagacccgccaggagaaguggaugacgggccggaugggggagcgccagcugcagaagaucgagcggugguucgugcgcaacccguucuucgccgucaccgcccucaccaucgccuaccuggugggcagcaacaugacccagcggguggucaucgcgcugcucgugcuggccgugggccccgccuacuccgcccacugcaucgggaucacggaccgcgacuucaucgagggcguccacgggggcaccugggugagcgcgacccuggagcaggacaagugcgugaccgucauggcccccgacaagcccucccucgacaucagccuggagacgguggccaucgaccggccggccgaggugcgcaaggucugcuacaacgccgugcugacccacgugaagaucaacgacaagugccccuccaccggcgaggcgcaccucgccgaggagaacgagggggacaacgccugcaagcggaccuacagcgaccggggcugggggaacggcugcgggcuguucggcaagggcuccaucgucgccugcgccaaguucacgugcgcgaagagcaugucccuguucgagguggaccagaccaagauccaguacgucauccgcgcccagcuccacgugggggccaagcaggagaacuggaacaccgacaucaagacccugaaguucgacgcccugagcggcagccaggagguggaguucaucggguacggcaaggccacgcucgagugccagguccagaccgcgguggacuucgggaacuccuacaucgccgagauggagaccgagagcuggaucguggaccggcagugggcccaggaccugacccugcccuggcaguccggcagcggcggggucuggcgcgagaugcaccaccucguggaguucgagcccccgcacgccgccacgauccgggugcuggcgcugggcaaccaggaggggucccucaagaccgcccugaccggcgccaugcgcgucaccaaggacacgaacgacaacaaccuguacaagcuccacgggggccacgugagcugccgggugaagcuguccgcccugacccucaagggcaccagcuacaagaucugcaccgacaagauguucuucgucaagaaccccacggacaccgggcacggcaccguggugaugcaggucaagguguccaagggggcgcccugccgcaucccggugaucgucgccgacgaccugaccgccgccaucaacaagggcauccuggugaccgugaacccgaucgccagcacgaacgacgacgagguccucaucgaggugaacccccccuucggcgacuccuacaucaucguggggcggggcgacagccgccugaccuaccaguggcacaaggagggguccagcaucggcaagcuguucacccagaccaugaagggggucgagcggcuggcggugaugggcgacacggccugggacuucuccagcgccggcggguucuucaccuccgugggcaaggggauccacaccgucuucggcagcgccuuccaggggcucuucggcggccugaacuggaucaccaaggugaucaugggggccgugcugaucugggucggcaucaacacgcgcaacaugaccauguccaugagcaugauccucgugggggugaucaugauguuccugagccugggcgucggggcggaccagggcugcgccaucaacuucggcaagugaggacuagucccuguucccagagcccacuuuuuuuucuuuuuuugaaauaaaauagccugucuuucagaucucaaaggcucuuuucagagccaccaaaaaaaaaaaaaaaaaaaaaaaaaaaaaaaaaaaaaaaaaaaaaaaaaaaaaaaaaaaaaaaaaaaaaaaaaaaaaaaaaaaaaaaaaaaaaaaaaaaaa

SEQ ID NO: 2154 - RNA, 2366 nt, Artificial Sequence
  mRNA product Design a-1 (hSL-A100) comprising derived and/or modified sequence from YFV__NC_002031.1__X-SS-prME-XX (polyprotein: aa92-788) (opt1)
gggagagucccgcagucggcguccagcggcucugcuuguucgugugugugucguugcaggccuuauucaagcuuaccaugcggggccugagcucccgcaagcggcgcagccacgacgugcucaccguccaguuccugauccuggggaugcuccugaugaccggcggggugacgcuggugcggaagaaccgcuggcuccugcugaacgucaccuccgaggaccucggcaagaccuucagcguggggaccggcaacugcacgaccaacauccuggaggccaaguacuggugccccgacuccauggaguacaacugcccgaaccugagcccccgggaggagcccgacgacaucgacugcuggugcuacggcguggagaacguccgcguggccuacgggaagugcgacuccgcgggccggagccgccggucccgccgggccaucgaccuccccacccacgagaaccacgggcugaagacccgccaggagaaguggaugacgggccggaugggggagcgccagcugcagaagaucgagcggugguucgugcgcaacccguucuucgccgucaccgcccucaccaucgccuaccuggugggcagcaacaugacccagcggguggucaucgcgcugcucgugcuggccgugggccccgccuacuccgcccacugcaucgggaucacggaccgcgacuucaucgagggcguccacgggggcaccugggugagcgcgacccuggagcaggacaagugcgugaccgucauggcccccgacaagcccucccucgacaucagccuggagacgguggccaucgaccggccggccgaggugcgcaaggucugcuacaacgccgugcugacccacgugaagaucaacgacaagugccccuccaccggcgaggcgcaccucgccgaggagaacgagggggacaacgccugcaagcggaccuacagcgaccggggcugggggaacggcugcgggcuguucggcaagggcuccaucgucgccugcgccaaguucacgugcgcgaaguccaugagccuguucgagguggaccagaccaagauccaguacgucauccgcgcccagcuccacgugggggccaagcaggagaacuggaacaccgacaucaagacccugaaguucgacgcccugagcggcagccaggagguggaguucaucggguacggcaaggccacgcucgagugccagguccagaccgcgguggacuucgggaacuccuacaucgccgagauggagaccgagagcuggaucguggaccggcagugggcccaggaccugacccugcccuggcaguccggcagcggcggggucuggcgcgagaugcaccaccucguggaguucgagcccccgcacgccgccacgauccgggugcuggcgcugggcaaccaggaggggucccucaagaccgcccugaccggcgccaugcgcgucaccaaggacacgaacgacaacaaccuguacaagcuccacgggggccacgugagcugccgggugaagcuguccgcccugacccucaagggcaccagcuacaagaucugcaccgacaagauguucuucgucaagaaccccacggacaccgggcacggcaccguggugaugcaggucaagguguccaagggggcgcccugccgcaucccggugaucgucgccgacgaccugaccgccgccaucaacaagggcauccuggugaccgugaacccgaucgccagcacgaacgacgacgagguccucaucgaggugaacccccccuucggcgacuccuacaucaucguggggcggggcgacagccgccugaccuaccaguggcacaaggagggguccagcaucggcaagcuguucacccagaccaugaagggggucgagcggcuggcggugaugggcgacacggccugggacuucuccagcgccggcggguucuucaccuccgugggcaaggggauccacaccgucuucggcagcgccuuccaggggcuguucggcggccucaacuggaucaccaaggugaucaugggggccgugcugaucugggucggcaucaacacgcgcaacaugaccauguccaugagcaugauccucgugggggugaucaugauguuccugagccugggcgucggggcggaccagggcugcgccaucaacuucggcaagugaggacuagucccuguucccagagcccacuuuuuuuucuuuuuuugaaauaaaauagccugucuuucagaucucaaaggcucuuuucagagccaccaaaaaaaaaaaaaaaaaaaaaaaaaaaaaaaaaaaaaaaaaaaaaaaaaaaaaaaaaaaaaaaaaaaaaaaaaaaaaaaaaaaaaaaaaaaaaaaaaaaaa

SEQ ID NO: 2155 - RNA, 2336 nt, Artificial Sequence
  mRNA product Design a-1 (hSL-A100) comprising derived and/or modified sequence from YFV__NC_002031.1__X-SS-prME (polyprotein: aa92-778) (opt1)
gggagagucccgcagucggcguccagcggcucugcuuguucgugugugugucguugcaggccuuauucaagcuuaccaugcggggccugagcucccgcaagcggcgcagccacgacgugcucaccguccaguuccugauccuggggaugcuccugaugaccggcggggugacgcuggugcggaagaaccgcuggcuccugcugaacgucaccuccgaggaccucggcaagaccuucagcguggggaccggcaacugcacgaccaacauccuggaggccaaguacuggugccccgacuccauggaguacaacugccccaaccugagcccccgggaggagcccgacgacaucgacugcuggugcuacggcguggagaacguccgcguggccuacgggaagugcgacuccgcgggccggagccgccggucccgccgggccaucgaccuccccacccacgagaaccacgggcugaagacccgccaggagaaguggaugacgggccggaugggggagcgccagcugcagaagaucgagcggugguucgugcgcaacccguucuucgccgucaccgcccucaccaucgccuaccuggugggcagcaacaugacccagcggguggucaucgcgcugcucgugcuggccgugggccccgccuacuccgcccacugcaucgggaucacggaccgcgacuucaucgagggcguccacgggggcaccugggugagcgcgacccuggagcaggacaagugcgugaccgucauggcccccgacaagcccucccucgacaucagccuggagacgguggccaucgaccggccggccgaggugcgcaaggucugcuacaacgccgugcugacccacgugaagaucaacgacaagugccccuccaccggcgaggcgcaccucgccgaggagaacgagggggacaacgccugcaagcggaccuacagcgaccggggcugggggaacggcugcgggcuguucggcaagggcuccaucgucgccugcgccaaguucacgugcgcgaaguccaugagccuguucgagguggaccagaccaagauccaguacgucauccgcgcccagcuccacgugggggccaagcaggagaacuggaacaccgacaucaagacccugaaguucgacgcccugagcggcagccaggagguggaguucaucggguacggcaaggccacgcucgagugccagguccagaccgcgguggacuucgggaacuccuacaucgccgagauggagaccgagagcuggaucguggaccggcagugggcccaggaccugacccugcccuggcaguccggcagcggcggggucuggcgcgagaugcaccaccucguggaguucgagcccccgcacgccgccacgauccgggugcuggcgcugggcaaccaggaggggucccucaagaccgcccugaccggcgccaugcgcgucaccaaggacacgaacgacaacaaccuguacaagcuccacgggggccacgugagcugccgggugaagcuguccgcccugacccucaagggcaccagcuacaagaucugcaccgacaagauguucuucgucaagaaccccacggacaccgggcacggcaccguggugaugcaggucaagguguccaagggggcgcccugccgcaucccggugaucgucgccgacgaccugaccgccgccaucaacaagggcauccuggugaccgugaacccgaucgccagcacgaacgacgacgagguccucaucgaggugaacccgcccuucggcgacuccuacaucaucguggggcggggcgacagccgccugaccuaccaguggcacaaggagggguccagcaucggcaagcuguucacccagaccaugaagggggucgagcggcuggcggugaugggcgacacggccugggacuucuccagcgccggcggguucuucaccuccgugggcaaggggauccacaccgucuucggcagcgccuuccaggggcuguucggcggccucaacuggaucaccaaggugaucaugggggccgugcugaucugggucggcaucaacacgcgcaacaugaccauguccaugagcaugauccucgugggggugaucaugauguuccugagccugggcgucggggcgugaggacuagucccuguucccagagcccacuuuuuuuucuuuuuuugaaauaaaauagccugucuuucagaucucaaaggcucuuuucagagccaccaaaaaaaaaaaaaaaaaaaaaaaaaaaaaaaaaaaaaaaaaaaaaaaaaaaaaaaaaaaaaaaaaaaaaaaaaaaaaaaaaaaaaaaaaaaaaaaaaaaaa

SEQ ID NO: 2156 - RNA, 2339 nt, Artificial Sequence
  mRNA product Design a-1 (hSL-A100) comprising derived and/or modified sequence from YFV__NC_002031.1__SSjev(V3)-prME-XX (polyprotein: aa122-788) (opt1)
gggagagucccgcagucggcguccagcggcucugcuuguucgugugugugucguugcaggccuuauucaagcuuaccaugaacgagggcagcaucauguggcuggccucccucgccguggucaucgcgugcgccggggccgugacgcuggugcggaagaaccgcuggcuccugcugaacgucaccuccgaggaccucggcaagaccuucagcguggggaccggcaacugcacgaccaacauccuggaggccaaguacuggugccccgacuccauggaguacaacugccccaaccugagcccccgggaggagcccgacgacaucgacugcuggugcuacggcguggagaacguccgcguggccuacgggaagugcgacuccgcgggccggagccgccggucccgccgggccaucgaccuccccacccacgagaaccacgggcugaagacccgccaggagaaguggaugacgggccggaugggggagcgccagcugcagaagaucgagcggugguucgugcgcaacccguucuucgccgucaccgcccucaccaucgccuaccuggugggcagcaacaugacccagcggguggucaucgcgcugcucgugcuggccgugggccccgccuacuccgcccacugcaucgggaucacggaccgcgacuucaucgagggcguccacgggggcaccugggugagcgcgacccuggagcaggacaagugcgugaccgucauggcccccgacaagcccucccucgacaucagccuggagacgguggccaucgaccggccggccgaggugcgcaaggucugcuacaacgccgugcugacccacgugaagaucaacgacaagugccccuccaccggcgaggcgcaccucgccgaggagaacgagggggacaacgccugcaagcggaccuacagcgaccggggcugggggaacggcugcgggcuguucggcaagggcuccaucgucgccugcgccaaguucacgugcgcgaaguccaugagccuguucgagguggaccagaccaagauccaguacgucauccgcgcccagcuccacgugggggccaagcaggagaacuggaacaccgacaucaagacccugaaguucgacgcccugagcggcagccaggagguggaguucaucggguacggcaaggccacgcucgagugccagguccagaccgcgguggacuucgggaacuccuacaucgccgagauggagaccgagagcuggaucguggaccggcagugggcccaggaccugacccugcccuggcaguccggcagcggcggggucuggcgcgagaugcaccaccucguggaguucgagcccccgcacgccgccacgauccgggugcuggcgcugggcaaccaggaggggucccucaagaccgcccugaccggcgccaugcgcgucaccaaggacacgaacgacaacaaccuguacaagcuccacgggggccacgugagcugccgggugaagcuguccgcccugacccucaagggcaccagcuacaagaucugcaccgacaagauguucuucgucaagaaccccacggacaccgggcacggcaccguggugaugcaggucaagguguccaagggggcgcccugccgcaucccggugaucgucgccgacgaccugaccgccgccaucaacaagggcauccuggugaccgugaacccgaucgccagcacgaacgacgacgagguccucaucgaggugaacccgcccuucggcgacuccuacaucaucguggggcggggcgacagccgccugaccuaccaguggcacaaggagggguccagcaucggcaagcuguucacccagaccaugaagggggucgagcggcuggcggugaugggcgacacggccugggacuucuccagcgccggcggguucuucaccuccgugggcaaggggauccacaccgucuucggcagcgccuuccaggggcuguucggcggccucaacuggaucaccaaggugaucaugggggccgugcugaucugggucggcaucaacacgcgcaacaugaccauguccaugagcaugauccucgugggggugaucaugauguuccugagccugggcgucggggcggaccagggcugcgccaucaacuucggcaagugaggacuagucccuguucccagagcccacuuuuuuuucuuuuuuugaaauaaaauagccugucuuucagaucucaaaggcucuuuucagagccaccaaaaaaaaaaaaaaaaaaaaaaaaaaaaaaaaaaaaaaaaaaaaaaaaaaaaaaaaaaaaaaaaaaaaaaaaaaaaaaaaaaaaaaaaaaaaaaaaaaaaa

SEQ ID NO: 2157 - RNA, 2348 nt, Artificial Sequence
  mRNA product Design a-1 (hSL-A100) comprising derived and/or modified sequence from YFV__NC_002031.1__X-SS-prMEdelstem_TM-JEV (polyprotein: aa92-681) (opt1)
gggagagucccgcagucggcguccagcggcucugcuuguucgugugugugucguugcaggccuuauucaagcuuaccaugcggggccugagcucccgcaagcggcgcagccacgacgugcucaccguccaguuccugauccuggggaugcuccugaugaccggcggggugacgcuggugcggaagaaccgcuggcuccugcugaacgucaccuccgaggaccucggcaagaccuucagcguggggaccggcaacugcacgaccaacauccuggaggccaaguacuggugccccgacuccauggaguacaacugccccaaccugagcccccgggaggagcccgacgacaucgacugcuggugcuacggcguggagaacguccgcguggccuacgggaagugcgacuccgcgggccggagccgccggucccgccgggccaucgaccuccccacccacgagaaccacgggcugaagacccgccaggagaaguggaugacgggccggaugggggagcgccagcugcagaagaucgagcggugguucgugcgcaacccguucuucgccgucaccgcccucaccaucgccuaccuggugggcagcaacaugacccagcggguggucaucgcgcugcucgugcuggccgugggccccgccuacuccgcccacugcaucgggaucacggaccgcgacuucaucgagggcguccacgggggcaccugggugagcgcgacccuggagcaggacaagugcgugaccgucauggcccccgacaagcccucccucgacaucagccuggagacgguggccaucgaccggccggccgaggugcgcaaggucugcuacaacgccgugcugacccacgugaagaucaacgacaagugccccuccaccggcgaggcgcaccucgccgaggagaacgagggggacaacgccugcaagcggaccuacagcgaccggggcugggggaacggcugcgggcuguucggcaagggcuccaucgucgccugcgccaaguucacgugcgcgaaguccaugagccuguucgagguggaccagaccaagauccaguacgucauccgcgcccagcuccacgugggggccaagcaggagaacuggaacaccgacaucaagacccugaaguucgacgcccugagcggcagccaggagguggaguucaucggguacggcaaggccacgcucgagugccagguccagaccgcgguggacuucgggaacuccuacaucgccgagauggagaccgagagcuggaucguggaccggcagugggcccaggaccugacccugcccuggcaguccggcagcggcggggucuggcgcgagaugcaccaccucguggaguucgagcccccgcacgccgccacgauccgggugcuggcgcugggcaaccaggaggggucccucaagaccgcccugaccggcgccaugcgcgucaccaaggacacgaacgacaacaaccuguacaagcuccacgggggccacgugagcugccgggugaagcuguccgcccugacccucaagggcaccagcuacaagaucugcaccgacaagauguucuucgucaagaaccccacggacaccgggcacggcaccguggugaugcaggucaagguguccaagggggcgcccugccgcaucccggugaucgucgccgacgaccugaccgccgccaucaacaagggcauccuggugaccgugaacccgaucgccagcacgaacgacgacgagguccucaucgaggugaacccgcccuucggcgacuccuacaucaucguggggcggggcgacagccgccugaccuaccaguggcacaaggagggguccagcaucggaagcacgcugggcaaggccuuuucaacaacuuugaagggagcucaaagacuggcagcguugggcgacacagccugggacuuuggcucuauuggaggggucuucaacuccauagguagagccguucaccaaguguuuggaggugccuucagaacacucuuugggggaaugucuuggaucacacaagggcuaaugggugcccuacugcucuggaugggcgucaacgcacgagaccgaucaauugcuuuggccuucuuagccacaggaggugugcucguguucuuagcgaccaaugugcacgccugaggacuagucccuguucccagagcccacuuuuuuuucuuuuuuugaaauaaaauagccugucuuucagaucucaaaggcucuuuucagagccaccaaaaaaaaaaaaaaaaaaaaaaaaaaaaaaaaaaaaaaaaaaaaaaaaaaaaaaaaaaaaaaaaaaaaaaaaaaaaaaaaaaaaaaaaaaaaaaaaaaaaa

SEQ ID NO: 2158 - RNA, 2321 nt, Artificial Sequence
  mRNA product Design a-1 (hSL-A100) comprising derived and/or modified sequence from YFV__NC_002031.1__SSjev(V3)-prMEdelstem_TM-JEV (polyprotein: aa122-681) (opt1)
gggagagucccgcagucggcguccagcggcucugcuuguucgugugugugucguugcaggccuuauucaagcuuaccaugaacgagggcagcaucauguggcuggccucccucgccguggucaucgcgugcgccggggccgugacgcuggugcggaagaaccgcuggcuccugcugaacgucaccuccgaggaccucggcaagaccuucagcguggggaccggcaacugcacgaccaacauccuggaggccaaguacuggugccccgacuccauggaguacaacugccccaaccugagcccccgggaggagcccgacgacaucgacugcuggugcuacggcguggagaacguccgcguggccuacgggaagugcgacuccgcgggccggagccgccggucccgccgggccaucgaccuccccacccacgagaaccacgggcugaagacccgccaggagaaguggaugacgggccggaugggggagcgccagcugcagaagaucgagcggugguucgugcgcaacccguucuucgccgucaccgcccucaccaucgccuaccuggugggcagcaacaugacccagcggguggucaucgcgcugcucgugcuggccgugggccccgccuacuccgcccacugcaucgggaucacggaccgcgacuucaucgagggcguccacgggggcaccugggugagcgcgacccuggagcaggacaagugcgugaccgucauggcccccgacaagcccucccucgacaucagccuggagacgguggccaucgaccggccggccgaggugcgcaaggucugcuacaacgccgugcugacccacgugaagaucaacgacaagugccccuccaccggcgaggcgcaccucgccgaggagaacgagggggacaacgccugcaagcggaccuacagcgaccggggcugggggaacggcugcgggcuguucggcaagggcuccaucgucgccugcgccaaguucacgugcgcgaaguccaugagccuguucgagguggaccagaccaagauccaguacgucauccgcgcccagcuccacgugggggccaagcaggagaacuggaacaccgacaucaagacccugaaguucgacgcccugagcggcagccaggagguggaguucaucggguacggcaaggccacgcucgagugccagguccagaccgcgguggacuucgggaacuccuacaucgccgagauggagaccgagagcuggaucguggaccggcagugggcccaggaccugacccugcccuggcaguccggcagcggcggggucuggcgcgagaugcaccaccucguggaguucgagcccccgcacgccgccacgauccgggugcuggcgcugggcaaccaggaggggucccucaagaccgcccugaccggcgccaugcgcgucaccaaggacacgaacgacaacaaccuguacaagcuccacgggggccacgugagcugccgggugaagcuguccgcccugacccucaagggcaccagcuacaagaucugcaccgacaagauguucuucgucaagaaccccacggacaccgggcacggcaccguggugaugcaggucaagguguccaagggggcgcccugccgcaucccggugaucgucgccgacgaccugaccgccgccaucaacaagggcauccuggugaccgugaacccgaucgccagcacgaacgacgacgagguccucaucgaggugaacccgcccuucggcgacuccuacaucaucguggggcggggcgacagccgccugaccuaccaguggcacaaggagggguccagcaucggcagcacccuggggaaggccuucuccaccacgcucaagggcgcccagcgccuggcggcccugggggacaccgccugggacuucggcagcaucgggggcguguucaacuccaucggccgggccguccaccagguguucgggggcgccuuccgcacccucuucgggggcaugagcuggaucacccaggggcugaugggcgcgcugcuccuguggaugggggugaacgcccgggaccgcuccaucgcccuggccuuccucgcgacgggcggcguccugguguuccuggccaccaacgugcacgccugaggacuagucccuguucccagagcccacuuuuuuuucuuuuuuugaaauaaaauagccugucuuucagaucucaaaggcucuuuucagagccaccaaaaaaaaaaaaaaaaaaaaaaaaaaaaaaaaaaaaaaaaaaaaaaaaaaaaaaaaaaaaaaaaaaaaaaaaaaaaaaaaaaaaaaaaaaaaaaaaaaaaa

SEQ ID NO: 2159 - RNA, 2307 nt, Artificial Sequence
  mRNA product Design i-3 (hSL-A100) comprising derived and/or modified sequence from YFV__NC_002031.1__X-SS-prME-XX (polyprotein: aa92-788) (opt1)
gggagaaagcuuaccaugcggggccugagcucccgcaagcggcgcagccacgacgugcucaccguccaguuccugauccuggggaugcuccugaugaccggcggggugacgcuggugcggaagaaccgcuggcuccugcugaacgucaccuccgaggaccucggcaagaccuucagcguggggaccggcaacugcacgaccaacauccuggaggccaaguacuggugccccgacuccauggaguacaacugcccgaaccugagcccccgggaggagcccgacgacaucgacugcuggugcuacggcguggagaacguccgcguggccuacgggaagugcgacuccgcgggccggagccgccggucccgccgggccaucgaccuccccacccacgagaaccacgggcugaagacccgccaggagaaguggaugacgggccggaugggggagcgccagcugcagaagaucgagcggugguucgugcgcaacccguucuucgccgucaccgcccucaccaucgccuaccuggugggcagcaacaugacccagcggguggucaucgcgcugcucgugcuggccgugggccccgccuacuccgcccacugcaucgggaucacggaccgcgacuucaucgagggcguccacgggggcaccugggugagcgcgacccuggagcaggacaagugcgugaccgucauggcccccgacaagcccucccucgacaucagccuggagacgguggccaucgaccggccggccgaggugcgcaaggucugcuacaacgccgugcugacccacgugaagaucaacgacaagugccccuccaccggcgaggcgcaccucgccgaggagaacgagggggacaacgccugcaagcggaccuacagcgaccggggcugggggaacggcugcgggcuguucggcaagggcuccaucgucgccugcgccaaguucacgugcgcgaagagcaugucccuguucgagguggaccagaccaagauccaguacgucauccgcgcccagcuccacgugggggccaagcaggagaacuggaacaccgacaucaagacccugaaguucgacgcccugagcggcagccaggagguggaguucaucggguacggcaaggccacgcucgagugccagguccagaccgcgguggacuucgggaacuccuacaucgccgagauggagaccgagagcuggaucguggaccggcagugggcccaggaccugacccugcccuggcaguccggcagcggcggggucuggcgcgagaugcaccaccucguggaguucgagcccccgcacgccgccacgauccgggugcuggcgcugggcaaccaggaggggucccucaagaccgcccugaccggcgccaugcgcgucaccaaggacacgaacgacaacaaccuguacaagcuccacgggggccacgugagcugccgggugaagcuguccgcccugacccucaagggcaccagcuacaagaucugcaccgacaagauguucuucgucaagaaccccacggacaccgggcacggcaccguggugaugcaggucaagguguccaagggggcgcccugccgcaucccggugaucgucgccgacgaccugaccgccgccaucaacaagggcauccuggugaccgugaacccgaucgccagcacgaacgacgacgagguccucaucgaggugaacccccccuucggcgacuccuacaucaucguggggcggggcgacagccgccugaccuaccaguggcacaaggagggguccagcaucggcaagcuguucacccagaccaugaagggggucgagcggcuggcggugaugggcgacacggccugggacuucuccagcgccggcggguucuucaccuccgugggcaaggggauccacaccgucuucggcagcgccuuccaggggcucuucggcggccugaacuggaucaccaaggugaucaugggggccgugcugaucugggucggcaucaacacgcgcaacaugaccauguccaugagcaugauccucgugggggugaucaugauguuccugagccugggcgucggggcggaccagggcugcgccaucaacuucggcaagugaggacuaguuauaagacugacuagcccgaugggccucccaacgggcccuccuccccuccuugcaccgagauuaaucaaaggcucuuuucagagccaccaaaaaaaaaaaaaaaaaaaaaaaaaaaaaaaaaaaaaaaaaaaaaaaaaaaaaaaaaaaaaaaaaaaaaaaaaaaaaaaaaaaaaaaaaaaaaaaaaaaaa

SEQ ID NO: 2160 - RNA, 2307 nt, Artificial Sequence
  mRNA product Design i-3 (hSL-A100) comprising derived and/or modified sequence from YFV__NC_002031.1__X-SS-prME-XX (polyprotein: aa92-788) (opt1)
gggagaaagcuuaccaugcggggccugagcucccgcaagcggcgcagccacgacgugcucaccguccaguuccugauccuggggaugcuccugaugaccggcggggugacgcuggugcggaagaaccgcuggcuccugcugaacgucaccuccgaggaccucggcaagaccuucagcguggggaccggcaacugcacgaccaacauccuggaggccaaguacuggugccccgacuccauggaguacaacugcccgaaccugagcccccgggaggagcccgacgacaucgacugcuggugcuacggcguggagaacguccgcguggccuacgggaagugcgacuccgcgggccggagccgccggucccgccgggccaucgaccuccccacccacgagaaccacgggcugaagacccgccaggagaaguggaugacgggccggaugggggagcgccagcugcagaagaucgagcggugguucgugcgcaacccguucuucgccgucaccgcccucaccaucgccuaccuggugggcagcaacaugacccagcggguggucaucgcgcugcucgugcuggccgugggccccgccuacuccgcccacugcaucgggaucacggaccgcgacuucaucgagggcguccacgggggcaccugggugagcgcgacccuggagcaggacaagugcgugaccgucauggcccccgacaagcccucccucgacaucagccuggagacgguggccaucgaccggccggccgaggugcgcaaggucugcuacaacgccgugcugacccacgugaagaucaacgacaagugccccuccaccggcgaggcgcaccucgccgaggagaacgagggggacaacgccugcaagcggaccuacagcgaccggggcugggggaacggcugcgggcuguucggcaagggcuccaucgucgccugcgccaaguucacgugcgcgaaguccaugagccuguucgagguggaccagaccaagauccaguacgucauccgcgcccagcuccacgugggggccaagcaggagaacuggaacaccgacaucaagacccugaaguucgacgcccugagcggcagccaggagguggaguucaucggguacggcaaggccacgcucgagugccagguccagaccgcgguggacuucgggaacuccuacaucgccgagauggagaccgagagcuggaucguggaccggcagugggcccaggaccugacccugcccuggcaguccggcagcggcggggucuggcgcgagaugcaccaccucguggaguucgagcccccgcacgccgccacgauccgggugcuggcgcugggcaaccaggaggggucccucaagaccgcccugaccggcgccaugcgcgucaccaaggacacgaacgacaacaaccuguacaagcuccacgggggccacgugagcugccgggugaagcuguccgcccugacccucaagggcaccagcuacaagaucugcaccgacaagauguucuucgucaagaaccccacggacaccgggcacggcaccguggugaugcaggucaagguguccaagggggcgcccugccgcaucccggugaucgucgccgacgaccugaccgccgccaucaacaagggcauccuggugaccgugaacccgaucgccagcacgaacgacgacgagguccucaucgaggugaacccccccuucggcgacuccuacaucaucguggggcggggcgacagccgccugaccuaccaguggcacaaggagggguccagcaucggcaagcuguucacccagaccaugaagggggucgagcggcuggcggugaugggcgacacggccugggacuucuccagcgccggcggguucuucaccuccgugggcaaggggauccacaccgucuucggcagcgccuuccaggggcuguucggcggccucaacuggaucaccaaggugaucaugggggccgugcugaucugggucggcaucaacacgcgcaacaugaccauguccaugagcaugauccucgugggggugaucaugauguuccugagccugggcgucggggcggaccagggcugcgccaucaacuucggcaagugaggacuaguuauaagacugacuagcccgaugggccucccaacgggcccuccuccccuccuugcaccgagauuaaucaaaggcucuuuucagagccaccaaaaaaaaaaaaaaaaaaaaaaaaaaaaaaaaaaaaaaaaaaaaaaaaaaaaaaaaaaaaaaaaaaaaaaaaaaaaaaaaaaaaaaaaaaaaaaaaaaaaa

SEQ ID NO: 2161 - RNA, 2277 nt, Artificial Sequence
  mRNA product Design i-3 (hSL-A100) comprising derived and/or modified sequence from YFV__NC_002031.1__X-SS-prME (polyprotein: aa92-778) (opt1)
gggagaaagcuuaccaugcggggccugagcucccgcaagcggcgcagccacgacgugcucaccguccaguuccugauccuggggaugcuccugaugaccggcggggugacgcuggugcggaagaaccgcuggcuccugcugaacgucaccuccgaggaccucggcaagaccuucagcguggggaccggcaacugcacgaccaacauccuggaggccaaguacuggugccccgacuccauggaguacaacugccccaaccugagcccccgggaggagcccgacgacaucgacugcuggugcuacggcguggagaacguccgcguggccuacgggaagugcgacuccgcgggccggagccgccggucccgccgggccaucgaccuccccacccacgagaaccacgggcugaagacccgccaggagaaguggaugacgggccggaugggggagcgccagcugcagaagaucgagcggugguucgugcgcaacccguucuucgccgucaccgcccucaccaucgccuaccuggugggcagcaacaugacccagcggguggucaucgcgcugcucgugcuggccgugggccccgccuacuccgcccacugcaucgggaucacggaccgcgacuucaucgagggcguccacgggggcaccugggugagcgcgacccuggagcaggacaagugcgugaccgucauggcccccgacaagcccucccucgacaucagccuggagacgguggccaucgaccggccggccgaggugcgcaaggucugcuacaacgccgugcugacccacgugaagaucaacgacaagugccccuccaccggcgaggcgcaccucgccgaggagaacgagggggacaacgccugcaagcggaccuacagcgaccggggcugggggaacggcugcgggcuguucggcaagggcuccaucgucgccugcgccaaguucacgugcgcgaaguccaugagccuguucgagguggaccagaccaagauccaguacgucauccgcgcccagcuccacgugggggccaagcaggagaacuggaacaccgacaucaagacccugaaguucgacgcccugagcggcagccaggagguggaguucaucggguacggcaaggccacgcucgagugccagguccagaccgcgguggacuucgggaacuccuacaucgccgagauggagaccgagagcuggaucguggaccggcagugggcccaggaccugacccugcccuggcaguccggcagcggcggggucuggcgcgagaugcaccaccucguggaguucgagcccccgcacgccgccacgauccgggugcuggcgcugggcaaccaggaggggucccucaagaccgcccugaccggcgccaugcgcgucaccaaggacacgaacgacaacaaccuguacaagcuccacgggggccacgugagcugccgggugaagcuguccgcccugacccucaagggcaccagcuacaagaucugcaccgacaagauguucuucgucaagaaccccacggacaccgggcacggcaccguggugaugcaggucaagguguccaagggggcgcccugccgcaucccggugaucgucgccgacgaccugaccgccgccaucaacaagggcauccuggugaccgugaacccgaucgccagcacgaacgacgacgagguccucaucgaggugaacccgcccuucggcgacuccuacaucaucguggggcggggcgacagccgccugaccuaccaguggcacaaggagggguccagcaucggcaagcuguucacccagaccaugaagggggucgagcggcuggcggugaugggcgacacggccugggacuucuccagcgccggcggguucuucaccuccgugggcaaggggauccacaccgucuucggcagcgccuuccaggggcuguucggcggccucaacuggaucaccaaggugaucaugggggccgugcugaucugggucggcaucaacacgcgcaacaugaccauguccaugagcaugauccucgugggggugaucaugauguuccugagccugggcgucggggcgugaggacuaguuauaagacugacuagcccgaugggccucccaacgggcccuccuccccuccuugcaccgagauuaaucaaaggcucuuuucagagccaccaaaaaaaaaaaaaaaaaaaaaaaaaaaaaaaaaaaaaaaaaaaaaaaaaaaaaaaaaaaaaaaaaaaaaaaaaaaaaaaaaaaaaaaaaaaaaaaaaaaaa

SEQ ID NO: 2162 - RNA, 2280 nt, Artificial Sequence
  mRNA product Design i-3 (hSL-A100) comprising derived and/or modified sequence from YFV__NC_002031.1__SSjev(V3)-prME-XX (polyprotein: aa122-788) (opt1)
gggagaaagcuuaccaugaacgagggcagcaucauguggcuggccucccucgccguggucaucgcgugcgccggggccgugacgcuggugcggaagaaccgcuggcuccugcugaacgucaccuccgaggaccucggcaagaccuucagcguggggaccggcaacugcacgaccaacauccuggaggccaaguacuggugccccgacuccauggaguacaacugccccaaccugagcccccgggaggagcccgacgacaucgacugcuggugcuacggcguggagaacguccgcguggccuacgggaagugcgacuccgcgggccggagccgccggucccgccgggccaucgaccuccccacccacgagaaccacgggcugaagacccgccaggagaaguggaugacgggccggaugggggagcgccagcugcagaagaucgagcggugguucgugcgcaacccguucuucgccgucaccgcccucaccaucgccuaccuggugggcagcaacaugacccagcggguggucaucgcgcugcucgugcuggccgugggccccgccuacuccgcccacugcaucgggaucacggaccgcgacuucaucgagggcguccacgggggcaccugggugagcgcgacccuggagcaggacaagugcgugaccgucauggcccccgacaagcccucccucgacaucagccuggagacgguggccaucgaccggccggccgaggugcgcaaggucugcuacaacgccgugcugacccacgugaagaucaacgacaagugccccuccaccggcgaggcgcaccucgccgaggagaacgagggggacaacgccugcaagcggaccuacagcgaccggggcugggggaacggcugcgggcuguucggcaagggcuccaucgucgccugcgccaaguucacgugcgcgaaguccaugagccuguucgagguggaccagaccaagauccaguacgucauccgcgcccagcuccacgugggggccaagcaggagaacuggaacaccgacaucaagacccugaaguucgacgcccugagcggcagccaggagguggaguucaucggguacggcaaggccacgcucgagugccagguccagaccgcgguggacuucgggaacuccuacaucgccgagauggagaccgagagcuggaucguggaccggcagugggcccaggaccugacccugcccuggcaguccggcagcggcggggucuggcgcgagaugcaccaccucguggaguucgagcccccgcacgccgccacgauccgggugcuggcgcugggcaaccaggaggggucccucaagaccgcccugaccggcgccaugcgcgucaccaaggacacgaacgacaacaaccuguacaagcuccacgggggccacgugagcugccgggugaagcuguccgcccugacccucaagggcaccagcuacaagaucugcaccgacaagauguucuucgucaagaaccccacggacaccgggcacggcaccguggugaugcaggucaagguguccaagggggcgcccugccgcaucccggugaucgucgccgacgaccugaccgccgccaucaacaagggcauccuggugaccgugaacccgaucgccagcacgaacgacgacgagguccucaucgaggugaacccgcccuucggcgacuccuacaucaucguggggcggggcgacagccgccugaccuaccaguggcacaaggagggguccagcaucggcaagcuguucacccagaccaugaagggggucgagcggcuggcggugaugggcgacacggccugggacuucuccagcgccggcggguucuucaccuccgugggcaaggggauccacaccgucuucggcagcgccuuccaggggcuguucggcggccucaacuggaucaccaaggugaucaugggggccgugcugaucugggucggcaucaacacgcgcaacaugaccauguccaugagcaugauccucgugggggugaucaugauguuccugagccugggcgucggggcggaccagggcugcgccaucaacuucggcaagugaggacuaguuauaagacugacuagcccgaugggccucccaacgggcccuccuccccuccuugcaccgagauuaaucaaaggcucuuuucagagccaccaaaaaaaaaaaaaaaaaaaaaaaaaaaaaaaaaaaaaaaaaaaaaaaaaaaaaaaaaaaaaaaaaaaaaaaaaaaaaaaaaaaaaaaaaaaaaaaaaaaaa

SEQ ID NO: 2163 - RNA, 2289 nt, Artificial Sequence
  mRNA product Design i-3 (hSL-A100) comprising derived and/or modified sequence from YFV__NC_002031.1__X-SS-prMEdelstem_TM-JEV (polyprotein: aa92-681) (opt1)
gggagaaagcuuaccaugcggggccugagcucccgcaagcggcgcagccacgacgugcucaccguccaguuccugauccuggggaugcuccugaugaccggcggggugacgcuggugcggaagaaccgcuggcuccugcugaacgucaccuccgaggaccucggcaagaccuucagcguggggaccggcaacugcacgaccaacauccuggaggccaaguacuggugccccgacuccauggaguacaacugccccaaccugagcccccgggaggagcccgacgacaucgacugcuggugcuacggcguggagaacguccgcguggccuacgggaagugcgacuccgcgggccggagccgccggucccgccgggccaucgaccuccccacccacgagaaccacgggcugaagacccgccaggagaaguggaugacgggccggaugggggagcgccagcugcagaagaucgagcggugguucgugcgcaacccguucuucgccgucaccgcccucaccaucgccuaccuggugggcagcaacaugacccagcggguggucaucgcgcugcucgugcuggccgugggccccgccuacuccgcccacugcaucgggaucacggaccgcgacuucaucgagggcguccacgggggcaccugggugagcgcgacccuggagcaggacaagugcgugaccgucauggcccccgacaagcccucccucgacaucagccuggagacgguggccaucgaccggccggccgaggugcgcaaggucugcuacaacgccgugcugacccacgugaagaucaacgacaagugccccuccaccggcgaggcgcaccucgccgaggagaacgagggggacaacgccugcaagcggaccuacagcgaccggggcugggggaacggcugcgggcuguucggcaagggcuccaucgucgccugcgccaaguucacgugcgcgaaguccaugagccuguucgagguggaccagaccaagauccaguacgucauccgcgcccagcuccacgugggggccaagcaggagaacuggaacaccgacaucaagacccugaaguucgacgcccugagcggcagccaggagguggaguucaucggguacggcaaggccacgcucgagugccagguccagaccgcgguggacuucgggaacuccuacaucgccgagauggagaccgagagcuggaucguggaccggcagugggcccaggaccugacccugcccuggcaguccggcagcggcggggucuggcgcgagaugcaccaccucguggaguucgagcccccgcacgccgccacgauccgggugcuggcgcugggcaaccaggaggggucccucaagaccgcccugaccggcgccaugcgcgucaccaaggacacgaacgacaacaaccuguacaagcuccacgggggccacgugagcugccgggugaagcuguccgcccugacccucaagggcaccagcuacaagaucugcaccgacaagauguucuucgucaagaaccccacggacaccgggcacggcaccguggugaugcaggucaagguguccaagggggcgcccugccgcaucccggugaucgucgccgacgaccugaccgccgccaucaacaagggcauccuggugaccgugaacccgaucgccagcacgaacgacgacgagguccucaucgaggugaacccgcccuucggcgacuccuacaucaucguggggcggggcgacagccgccugaccuaccaguggcacaaggagggguccagcaucggaagcacgcugggcaaggccuuuucaacaacuuugaagggagcucaaagacuggcagcguugggcgacacagccugggacuuuggcucuauuggaggggucuucaacuccauagguagagccguucaccaaguguuuggaggugccuucagaacacucuuugggggaaugucuuggaucacacaagggcuaaugggugcccuacugcucuggaugggcgucaacgcacgagaccgaucaauugcuuuggccuucuuagccacaggaggugugcucguguucuuagcgaccaaugugcacgccugaggacuaguuauaagacugacuagcccgaugggccucccaacgggcccuccuccccuccuugcaccgagauuaaucaaaggcucuuuucagagccaccaaaaaaaaaaaaaaaaaaaaaaaaaaaaaaaaaaaaaaaaaaaaaaaaaaaaaaaaaaaaaaaaaaaaaaaaaaaaaaaaaaaaaaaaaaaaaaaaaaaaa

SEQ ID NO: 2164 - RNA, 2262 nt, Artificial Sequence
  mRNA product Design i-3 (hSL-A100) comprising derived and/or modified sequence from YFV__NC_002031.1__SSjev(V3)-prMEdelstem_TM-JEV (polyprotein: aa122-681) (opt1)
gggagaaagcuuaccaugaacgagggcagcaucauguggcuggccucccucgccguggucaucgcgugcgccggggccgugacgcuggugcggaagaaccgcuggcuccugcugaacgucaccuccgaggaccucggcaagaccuucagcguggggaccggcaacugcacgaccaacauccuggaggccaaguacuggugccccgacuccauggaguacaacugccccaaccugagcccccgggaggagcccgacgacaucgacugcuggugcuacggcguggagaacguccgcguggccuacgggaagugcgacuccgcgggccggagccgccggucccgccgggccaucgaccuccccacccacgagaaccacgggcugaagacccgccaggagaaguggaugacgggccggaugggggagcgccagcugcagaagaucgagcggugguucgugcgcaacccguucuucgccgucaccgcccucaccaucgccuaccuggugggcagcaacaugacccagcggguggucaucgcgcugcucgugcuggccgugggccccgccuacuccgcccacugcaucgggaucacggaccgcgacuucaucgagggcguccacgggggcaccugggugagcgcgacccuggagcaggacaagugcgugaccgucauggcccccgacaagcccucccucgacaucagccuggagacgguggccaucgaccggccggccgaggugcgcaaggucugcuacaacgccgugcugacccacgugaagaucaacgacaagugccccuccaccggcgaggcgcaccucgccgaggagaacgagggggacaacgccugcaagcggaccuacagcgaccggggcugggggaacggcugcgggcuguucggcaagggcuccaucgucgccugcgccaaguucacgugcgcgaaguccaugagccuguucgagguggaccagaccaagauccaguacgucauccgcgcccagcuccacgugggggccaagcaggagaacuggaacaccgacaucaagacccugaaguucgacgcccugagcggcagccaggagguggaguucaucggguacggcaaggccacgcucgagugccagguccagaccgcgguggacuucgggaacuccuacaucgccgagauggagaccgagagcuggaucguggaccggcagugggcccaggaccugacccugcccuggcaguccggcagcggcggggucuggcgcgagaugcaccaccucguggaguucgagcccccgcacgccgccacgauccgggugcuggcgcugggcaaccaggaggggucccucaagaccgcccugaccggcgccaugcgcgucaccaaggacacgaacgacaacaaccuguacaagcuccacgggggccacgugagcugccgggugaagcuguccgcccugacccucaagggcaccagcuacaagaucugcaccgacaagauguucuucgucaagaaccccacggacaccgggcacggcaccguggugaugcaggucaagguguccaagggggcgcccugccgcaucccggugaucgucgccgacgaccugaccgccgccaucaacaagggcauccuggugaccgugaacccgaucgccagcacgaacgacgacgagguccucaucgaggugaacccgcccuucggcgacuccuacaucaucguggggcggggcgacagccgccugaccuaccaguggcacaaggagggguccagcaucggcagcacccuggggaaggccuucuccaccacgcucaagggcgcccagcgccuggcggcccugggggacaccgccugggacuucggcagcaucgggggcguguucaacuccaucggccgggccguccaccagguguucgggggcgccuuccgcacccucuucgggggcaugagcuggaucacccaggggcugaugggcgcgcugcuccuguggaugggggugaacgcccgggaccgcuccaucgcccuggccuuccucgcgacgggcggcguccugguguuccuggccaccaacgugcacgccugaggacuaguuauaagacugacuagcccgaugggccucccaacgggcccuccuccccuccuugcaccgagauuaaucaaaggcucuuuucagagccaccaaaaaaaaaaaaaaaaaaaaaaaaaaaaaaaaaaaaaaaaaaaaaaaaaaaaaaaaaaaaaaaaaaaaaaaaaaaaaaaaaaaaaaaaaaaaaaaaaaaaa

SEQ ID NO: 2165 - RNA, 2335 nt, Artificial Sequence
  mRNA product Design a-1 (hSL-A64-N5) comprising derived and/or modified sequence from YFV__NC_002031.1__X-SS-prME-XX (polyprotein: aa92-788) (opt1)
aggagagucccgcagucggcguccagcggcucugcuuguucgugugugugucguugcaggccuuauucaagcuuaccaugcggggccugagcucccgcaagcggcgcagccacgacgugcucaccguccaguuccugauccuggggaugcuccugaugaccggcggggugacgcuggugcggaagaaccgcuggcuccugcugaacgucaccuccgaggaccucggcaagaccuucagcguggggaccggcaacugcacgaccaacauccuggaggccaaguacuggugccccgacuccauggaguacaacugcccgaaccugagcccccgggaggagcccgacgacaucgacugcuggugcuacggcguggagaacguccgcguggccuacgggaagugcgacuccgcgggccggagccgccggucccgccgggccaucgaccuccccacccacgagaaccacgggcugaagacccgccaggagaaguggaugacgggccggaugggggagcgccagcugcagaagaucgagcggugguucgugcgcaacccguucuucgccgucaccgcccucaccaucgccuaccuggugggcagcaacaugacccagcggguggucaucgcgcugcucgugcuggccgugggccccgccuacuccgcccacugcaucgggaucacggaccgcgacuucaucgagggcguccacgggggcaccugggugagcgcgacccuggagcaggacaagugcgugaccgucauggcccccgacaagcccucccucgacaucagccuggagacgguggccaucgaccggccggccgaggugcgcaaggucugcuacaacgccgugcugacccacgugaagaucaacgacaagugccccuccaccggcgaggcgcaccucgccgaggagaacgagggggacaacgccugcaagcggaccuacagcgaccggggcugggggaacggcugcgggcuguucggcaagggcuccaucgucgccugcgccaaguucacgugcgcgaagagcaugucccuguucgagguggaccagaccaagauccaguacgucauccgcgcccagcuccacgugggggccaagcaggagaacuggaacaccgacaucaagacccugaaguucgacgcccugagcggcagccaggagguggaguucaucggguacggcaaggccacgcucgagugccagguccagaccgcgguggacuucgggaacuccuacaucgccgagauggagaccgagagcuggaucguggaccggcagugggcccaggaccugacccugcccuggcaguccggcagcggcggggucuggcgcgagaugcaccaccucguggaguucgagcccccgcacgccgccacgauccgggugcuggcgcugggcaaccaggaggggucccucaagaccgcccugaccggcgccaugcgcgucaccaaggacacgaacgacaacaaccuguacaagcuccacgggggccacgugagcugccgggugaagcuguccgcccugacccucaagggcaccagcuacaagaucugcaccgacaagauguucuucgucaagaaccccacggacaccgggcacggcaccguggugaugcaggucaagguguccaagggggcgcccugccgcaucccggugaucgucgccgacgaccugaccgccgccaucaacaagggcauccuggugaccgugaacccgaucgccagcacgaacgacgacgagguccucaucgaggugaacccccccuucggcgacuccuacaucaucguggggcggggcgacagccgccugaccuaccaguggcacaaggagggguccagcaucggcaagcuguucacccagaccaugaagggggucgagcggcuggcggugaugggcgacacggccugggacuucuccagcgccggcggguucuucaccuccgugggcaaggggauccacaccgucuucggcagcgccuuccaggggcucuucggcggccugaacuggaucaccaaggugaucaugggggccgugcugaucugggucggcaucaacacgcgcaacaugaccauguccaugagcaugauccucgugggggugaucaugauguuccugagccugggcgucggggcggaccagggcugcgccaucaacuucggcaagugaggacuagucccuguucccagagcccacuuuuuuuucuuuuuuugaaauaaaauagccugucuuucagaucucaaaggcucuuuucagagccaccaaaaaaaaaaaaaaaaaaaaaaaaaaaaaaaaaaaaaaaaaaaaaaaaaaaaaaaaaaaaaaaaagaauu

SEQ ID NO: 2166 - RNA, 2335 nt, Artificial Sequence
  mRNA product Design a-1 (hSL-A64-N5) comprising derived and/or modified sequence from YFV__NC_002031.1__X-SS-prME-XX (polyprotein: aa92-788) (opt1)
aggagagucccgcagucggcguccagcggcucugcuuguucgugugugugucguugcaggccuuauucaagcuuaccaugcggggccugagcucccgcaagcggcgcagccacgacgugcucaccguccaguuccugauccuggggaugcuccugaugaccggcggggugacgcuggugcggaagaaccgcuggcuccugcugaacgucaccuccgaggaccucggcaagaccuucagcguggggaccggcaacugcacgaccaacauccuggaggccaaguacuggugccccgacuccauggaguacaacugcccgaaccugagcccccgggaggagcccgacgacaucgacugcuggugcuacggcguggagaacguccgcguggccuacgggaagugcgacuccgcgggccggagccgccggucccgccgggccaucgaccuccccacccacgagaaccacgggcugaagacccgccaggagaaguggaugacgggccggaugggggagcgccagcugcagaagaucgagcggugguucgugcgcaacccguucuucgccgucaccgcccucaccaucgccuaccuggugggcagcaacaugacccagcggguggucaucgcgcugcucgugcuggccgugggccccgccuacuccgcccacugcaucgggaucacggaccgcgacuucaucgagggcguccacgggggcaccugggugagcgcgacccuggagcaggacaagugcgugaccgucauggcccccgacaagcccucccucgacaucagccuggagacgguggccaucgaccggccggccgaggugcgcaaggucugcuacaacgccgugcugacccacgugaagaucaacgacaagugccccuccaccggcgaggcgcaccucgccgaggagaacgagggggacaacgccugcaagcggaccuacagcgaccggggcugggggaacggcugcgggcuguucggcaagggcuccaucgucgccugcgccaaguucacgugcgcgaaguccaugagccuguucgagguggaccagaccaagauccaguacgucauccgcgcccagcuccacgugggggccaagcaggagaacuggaacaccgacaucaagacccugaaguucgacgcccugagcggcagccaggagguggaguucaucggguacggcaaggccacgcucgagugccagguccagaccgcgguggacuucgggaacuccuacaucgccgagauggagaccgagagcuggaucguggaccggcagugggcccaggaccugacccugcccuggcaguccggcagcggcggggucuggcgcgagaugcaccaccucguggaguucgagcccccgcacgccgccacgauccgggugcuggcgcugggcaaccaggaggggucccucaagaccgcccugaccggcgccaugcgcgucaccaaggacacgaacgacaacaaccuguacaagcuccacgggggccacgugagcugccgggugaagcuguccgcccugacccucaagggcaccagcuacaagaucugcaccgacaagauguucuucgucaagaaccccacggacaccgggcacggcaccguggugaugcaggucaagguguccaagggggcgcccugccgcaucccggugaucgucgccgacgaccugaccgccgccaucaacaagggcauccuggugaccgugaacccgaucgccagcacgaacgacgacgagguccucaucgaggugaacccccccuucggcgacuccuacaucaucguggggcggggcgacagccgccugaccuaccaguggcacaaggagggguccagcaucggcaagcuguucacccagaccaugaagggggucgagcggcuggcggugaugggcgacacggccugggacuucuccagcgccggcggguucuucaccuccgugggcaaggggauccacaccgucuucggcagcgccuuccaggggcuguucggcggccucaacuggaucaccaaggugaucaugggggccgugcugaucugggucggcaucaacacgcgcaacaugaccauguccaugagcaugauccucgugggggugaucaugauguuccugagccugggcgucggggcggaccagggcugcgccaucaacuucggcaagugaggacuagucccuguucccagagcccacuuuuuuuucuuuuuuugaaauaaaauagccugucuuucagaucucaaaggcucuuuucagagccaccaaaaaaaaaaaaaaaaaaaaaaaaaaaaaaaaaaaaaaaaaaaaaaaaaaaaaaaaaaaaaaaaagaauu

SEQ ID NO: 2167 - RNA, 2305 nt, Artificial Sequence
  mRNA product Design a-1 (hSL-A64-N5) comprising derived and/or modified sequence from YFV__NC_002031.1__X-SS-prME (polyprotein: aa92-778) (opt1)
aggagagucccgcagucggcguccagcggcucugcuuguucgugugugugucguugcaggccuuauucaagcuuaccaugcggggccugagcucccgcaagcggcgcagccacgacgugcucaccguccaguuccugauccuggggaugcuccugaugaccggcggggugacgcuggugcggaagaaccgcuggcuccugcugaacgucaccuccgaggaccucggcaagaccuucagcguggggaccggcaacugcacgaccaacauccuggaggccaaguacuggugccccgacuccauggaguacaacugccccaaccugagcccccgggaggagcccgacgacaucgacugcuggugcuacggcguggagaacguccgcguggccuacgggaagugcgacuccgcgggccggagccgccggucccgccgggccaucgaccuccccacccacgagaaccacgggcugaagacccgccaggagaaguggaugacgggccggaugggggagcgccagcugcagaagaucgagcggugguucgugcgcaacccguucuucgccgucaccgcccucaccaucgccuaccuggugggcagcaacaugacccagcggguggucaucgcgcugcucgugcuggccgugggccccgccuacuccgcccacugcaucgggaucacggaccgcgacuucaucgagggcguccacgggggcaccugggugagcgcgacccuggagcaggacaagugcgugaccgucauggcccccgacaagcccucccucgacaucagccuggagacgguggccaucgaccggccggccgaggugcgcaaggucugcuacaacgccgugcugacccacgugaagaucaacgacaagugccccuccaccggcgaggcgcaccucgccgaggagaacgagggggacaacgccugcaagcggaccuacagcgaccggggcugggggaacggcugcgggcuguucggcaagggcuccaucgucgccugcgccaaguucacgugcgcgaaguccaugagccuguucgagguggaccagaccaagauccaguacgucauccgcgcccagcuccacgugggggccaagcaggagaacuggaacaccgacaucaagacccugaaguucgacgcccugagcggcagccaggagguggaguucaucggguacggcaaggccacgcucgagugccagguccagaccgcgguggacuucgggaacuccuacaucgccgagauggagaccgagagcuggaucguggaccggcagugggcccaggaccugacccugcccuggcaguccggcagcggcggggucuggcgcgagaugcaccaccucguggaguucgagcccccgcacgccgccacgauccgggugcuggcgcugggcaaccaggaggggucccucaagaccgcccugaccggcgccaugcgcgucaccaaggacacgaacgacaacaaccuguacaagcuccacgggggccacgugagcugccgggugaagcuguccgcccugacccucaagggcaccagcuacaagaucugcaccgacaagauguucuucgucaagaaccccacggacaccgggcacggcaccguggugaugcaggucaagguguccaagggggcgcccugccgcaucccggugaucgucgccgacgaccugaccgccgccaucaacaagggcauccuggugaccgugaacccgaucgccagcacgaacgacgacgagguccucaucgaggugaacccgcccuucggcgacuccuacaucaucguggggcggggcgacagccgccugaccuaccaguggcacaaggagggguccagcaucggcaagcuguucacccagaccaugaagggggucgagcggcuggcggugaugggcgacacggccugggacuucuccagcgccggcggguucuucaccuccgugggcaaggggauccacaccgucuucggcagcgccuuccaggggcuguucggcggccucaacuggaucaccaaggugaucaugggggccgugcugaucugggucggcaucaacacgcgcaacaugaccauguccaugagcaugauccucgugggggugaucaugauguuccugagccugggcgucggggcgugaggacuagucccuguucccagagcccacuuuuuuuucuuuuuuugaaauaaaauagccugucuuucagaucucaaaggcucuuuucagagccaccaaaaaaaaaaaaaaaaaaaaaaaaaaaaaaaaaaaaaaaaaaaaaaaaaaaaaaaaaaaaaaaaagaauu

SEQ ID NO: 2168 - RNA, 2308 nt, Artificial Sequence
  mRNA product Design a-1 (hSL-A64-N5) comprising derived and/or modified sequence from YFV__NC_002031.1__SSjev(V3)-prME-XX (polyprotein: aa122-788) (opt1)
aggagagucccgcagucggcguccagcggcucugcuuguucgugugugugucguugcaggccuuauucaagcuuaccaugaacgagggcagcaucauguggcuggccucccucgccguggucaucgcgugcgccggggccgugacgcuggugcggaagaaccgcuggcuccugcugaacgucaccuccgaggaccucggcaagaccuucagcguggggaccggcaacugcacgaccaacauccuggaggccaaguacuggugccccgacuccauggaguacaacugccccaaccugagcccccgggaggagcccgacgacaucgacugcuggugcuacggcguggagaacguccgcguggccuacgggaagugcgacuccgcgggccggagccgccggucccgccgggccaucgaccuccccacccacgagaaccacgggcugaagacccgccaggagaaguggaugacgggccggaugggggagcgccagcugcagaagaucgagcggugguucgugcgcaacccguucuucgccgucaccgcccucaccaucgccuaccuggugggcagcaacaugacccagcggguggucaucgcgcugcucgugcuggccgugggccccgccuacuccgcccacugcaucgggaucacggaccgcgacuucaucgagggcguccacgggggcaccugggugagcgcgacccuggagcaggacaagugcgugaccgucauggcccccgacaagcccucccucgacaucagccuggagacgguggccaucgaccggccggccgaggugcgcaaggucugcuacaacgccgugcugacccacgugaagaucaacgacaagugccccuccaccggcgaggcgcaccucgccgaggagaacgagggggacaacgccugcaagcggaccuacagcgaccggggcugggggaacggcugcgggcuguucggcaagggcuccaucgucgccugcgccaaguucacgugcgcgaaguccaugagccuguucgagguggaccagaccaagauccaguacgucauccgcgcccagcuccacgugggggccaagcaggagaacuggaacaccgacaucaagacccugaaguucgacgcccugagcggcagccaggagguggaguucaucggguacggcaaggccacgcucgagugccagguccagaccgcgguggacuucgggaacuccuacaucgccgagauggagaccgagagcuggaucguggaccggcagugggcccaggaccugacccugcccuggcaguccggcagcggcggggucuggcgcgagaugcaccaccucguggaguucgagcccccgcacgccgccacgauccgggugcuggcgcugggcaaccaggaggggucccucaagaccgcccugaccggcgccaugcgcgucaccaaggacacgaacgacaacaaccuguacaagcuccacgggggccacgugagcugccgggugaagcuguccgcccugacccucaagggcaccagcuacaagaucugcaccgacaagauguucuucgucaagaaccccacggacaccgggcacggcaccguggugaugcaggucaagguguccaagggggcgcccugccgcaucccggugaucgucgccgacgaccugaccgccgccaucaacaagggcauccuggugaccgugaacccgaucgccagcacgaacgacgacgagguccucaucgaggugaacccgcccuucggcgacuccuacaucaucguggggcggggcgacagccgccugaccuaccaguggcacaaggagggguccagcaucggcaagcuguucacccagaccaugaagggggucgagcggcuggcggugaugggcgacacggccugggacuucuccagcgccggcggguucuucaccuccgugggcaaggggauccacaccgucuucggcagcgccuuccaggggcuguucggcggccucaacuggaucaccaaggugaucaugggggccgugcugaucugggucggcaucaacacgcgcaacaugaccauguccaugagcaugauccucgugggggugaucaugauguuccugagccugggcgucggggcggaccagggcugcgccaucaacuucggcaagugaggacuagucccuguucccagagcccacuuuuuuuucuuuuuuugaaauaaaauagccugucuuucagaucucaaaggcucuuuucagagccaccaaaaaaaaaaaaaaaaaaaaaaaaaaaaaaaaaaaaaaaaaaaaaaaaaaaaaaaaaaaaaaaaagaauu

SEQ ID NO: 2169 - RNA, 2317 nt, Artificial Sequence
  mRNA product Design a-1 (hSL-A64-N5) comprising derived and/or modified sequence from YFV__NC_002031.1__X-SS-prMEdelstem_TM-JEV (polyprotein: aa92-681) (opt1)
aggagagucccgcagucggcguccagcggcucugcuuguucgugugugugucguugcaggccuuauucaagcuuaccaugcggggccugagcucccgcaagcggcgcagccacgacgugcucaccguccaguuccugauccuggggaugcuccugaugaccggcggggugacgcuggugcggaagaaccgcuggcuccugcugaacgucaccuccgaggaccucggcaagaccuucagcguggggaccggcaacugcacgaccaacauccuggaggccaaguacuggugccccgacuccauggaguacaacugccccaaccugagcccccgggaggagcccgacgacaucgacugcuggugcuacggcguggagaacguccgcguggccuacgggaagugcgacuccgcgggccggagccgccggucccgccgggccaucgaccuccccacccacgagaaccacgggcugaagacccgccaggagaaguggaugacgggccggaugggggagcgccagcugcagaagaucgagcggugguucgugcgcaacccguucuucgccgucaccgcccucaccaucgccuaccuggugggcagcaacaugacccagcggguggucaucgcgcugcucgugcuggccgugggccccgccuacuccgcccacugcaucgggaucacggaccgcgacuucaucgagggcguccacgggggcaccugggugagcgcgacccuggagcaggacaagugcgugaccgucauggcccccgacaagcccucccucgacaucagccuggagacgguggccaucgaccggccggccgaggugcgcaaggucugcuacaacgccgugcugacccacgugaagaucaacgacaagugccccuccaccggcgaggcgcaccucgccgaggagaacgagggggacaacgccugcaagcggaccuacagcgaccggggcugggggaacggcugcgggcuguucggcaagggcuccaucgucgccugcgccaaguucacgugcgcgaaguccaugagccuguucgagguggaccagaccaagauccaguacgucauccgcgcccagcuccacgugggggccaagcaggagaacuggaacaccgacaucaagacccugaaguucgacgcccugagcggcagccaggagguggaguucaucggguacggcaaggccacgcucgagugccagguccagaccgcgguggacuucgggaacuccuacaucgccgagauggagaccgagagcuggaucguggaccggcagugggcccaggaccugacccugcccuggcaguccggcagcggcggggucuggcgcgagaugcaccaccucguggaguucgagcccccgcacgccgccacgauccgggugcuggcgcugggcaaccaggaggggucccucaagaccgcccugaccggcgccaugcgcgucaccaaggacacgaacgacaacaaccuguacaagcuccacgggggccacgugagcugccgggugaagcuguccgcccugacccucaagggcaccagcuacaagaucugcaccgacaagauguucuucgucaagaaccccacggacaccgggcacggcaccguggugaugcaggucaagguguccaagggggcgcccugccgcaucccggugaucgucgccgacgaccugaccgccgccaucaacaagggcauccuggugaccgugaacccgaucgccagcacgaacgacgacgagguccucaucgaggugaacccgcccuucggcgacuccuacaucaucguggggcggggcgacagccgccugaccuaccaguggcacaaggagggguccagcaucggaagcacgcugggcaaggccuuuucaacaacuuugaagggagcucaaagacuggcagcguugggcgacacagccugggacuuuggcucuauuggaggggucuucaacuccauagguagagccguucaccaaguguuuggaggugccuucagaacacucuuugggggaaugucuuggaucacacaagggcuaaugggugcccuacugcucuggaugggcgucaacgcacgagaccgaucaauugcuuuggccuucuuagccacaggaggugugcucguguucuuagcgaccaaugugcacgccugaggacuagucccuguucccagagcccacuuuuuuuucuuuuuuugaaauaaaauagccugucuuucagaucucaaaggcucuuuucagagccaccaaaaaaaaaaaaaaaaaaaaaaaaaaaaaaaaaaaaaaaaaaaaaaaaaaaaaaaaaaaaaaaaagaauu

SEQ ID NO: 2170 - RNA, 2290 nt, Artificial Sequence
  mRNA product Design a-1 (hSL-A64-N5) comprising derived and/or modified sequence from YFV__NC_002031.1__SSjev(V3)-prMEdelstem_TM-JEV (polyprotein: aa122-681) (opt1)
aggagagucccgcagucggcguccagcggcucugcuuguucgugugugugucguugcaggccuuauucaagcuuaccaugaacgagggcagcaucauguggcuggccucccucgccguggucaucgcgugcgccggggccgugacgcuggugcggaagaaccgcuggcuccugcugaacgucaccuccgaggaccucggcaagaccuucagcguggggaccggcaacugcacgaccaacauccuggaggccaaguacuggugccccgacuccauggaguacaacugccccaaccugagcccccgggaggagcccgacgacaucgacugcuggugcuacggcguggagaacguccgcguggccuacgggaagugcgacuccgcgggccggagccgccggucccgccgggccaucgaccuccccacccacgagaaccacgggcugaagacccgccaggagaaguggaugacgggccggaugggggagcgccagcugcagaagaucgagcggugguucgugcgcaacccguucuucgccgucaccgcccucaccaucgccuaccuggugggcagcaacaugacccagcggguggucaucgcgcugcucgugcuggccgugggccccgccuacuccgcccacugcaucgggaucacggaccgcgacuucaucgagggcguccacgggggcaccugggugagcgcgacccuggagcaggacaagugcgugaccgucauggcccccgacaagcccucccucgacaucagccuggagacgguggccaucgaccggccggccgaggugcgcaaggucugcuacaacgccgugcugacccacgugaagaucaacgacaagugccccuccaccggcgaggcgcaccucgccgaggagaacgagggggacaacgccugcaagcggaccuacagcgaccggggcugggggaacggcugcgggcuguucggcaagggcuccaucgucgccugcgccaaguucacgugcgcgaaguccaugagccuguucgagguggaccagaccaagauccaguacgucauccgcgcccagcuccacgugggggccaagcaggagaacuggaacaccgacaucaagacccugaaguucgacgcccugagcggcagccaggagguggaguucaucggguacggcaaggccacgcucgagugccagguccagaccgcgguggacuucgggaacuccuacaucgccgagauggagaccgagagcuggaucguggaccggcagugggcccaggaccugacccugcccuggcaguccggcagcggcggggucuggcgcgagaugcaccaccucguggaguucgagcccccgcacgccgccacgauccgggugcuggcgcugggcaaccaggaggggucccucaagaccgcccugaccggcgccaugcgcgucaccaaggacacgaacgacaacaaccuguacaagcuccacgggggccacgugagcugccgggugaagcuguccgcccugacccucaagggcaccagcuacaagaucugcaccgacaagauguucuucgucaagaaccccacggacaccgggcacggcaccguggugaugcaggucaagguguccaagggggcgcccugccgcaucccggugaucgucgccgacgaccugaccgccgccaucaacaagggcauccuggugaccgugaacccgaucgccagcacgaacgacgacgagguccucaucgaggugaacccgcccuucggcgacuccuacaucaucguggggcggggcgacagccgccugaccuaccaguggcacaaggagggguccagcaucggcagcacccuggggaaggccuucuccaccacgcucaagggcgcccagcgccuggcggcccugggggacaccgccugggacuucggcagcaucgggggcguguucaacuccaucggccgggccguccaccagguguucgggggcgccuuccgcacccucuucgggggcaugagcuggaucacccaggggcugaugggcgcgcugcuccuguggaugggggugaacgcccgggaccgcuccaucgcccuggccuuccucgcgacgggcggcguccugguguuccuggccaccaacgugcacgccugaggacuagucccuguucccagagcccacuuuuuuuucuuuuuuugaaauaaaauagccugucuuucagaucucaaaggcucuuuucagagccaccaaaaaaaaaaaaaaaaaaaaaaaaaaaaaaaaaaaaaaaaaaaaaaaaaaaaaaaaaaaaaaaaagaauu

SEQ ID NO: 2171 - RNA, 2276 nt, Artificial Sequence
  mRNA product Design i-3 (hSL-A64-N5) comprising derived and/or modified sequence from YFV__NC_002031.1__X-SS-prME-XX (polyprotein: aa92-788) (opt1) R8481/R8482
aggagaaagcuuaccaugcggggccugagcucccgcaagcggcgcagccacgacgugcucaccguccaguuccugauccuggggaugcuccugaugaccggcggggugacgcuggugcggaagaaccgcuggcuccugcugaacgucaccuccgaggaccucggcaagaccuucagcguggggaccggcaacugcacgaccaacauccuggaggccaaguacuggugccccgacuccauggaguacaacugcccgaaccugagcccccgggaggagcccgacgacaucgacugcuggugcuacggcguggagaacguccgcguggccuacgggaagugcgacuccgcgggccggagccgccggucccgccgggccaucgaccuccccacccacgagaaccacgggcugaagacccgccaggagaaguggaugacgggccggaugggggagcgccagcugcagaagaucgagcggugguucgugcgcaacccguucuucgccgucaccgcccucaccaucgccuaccuggugggcagcaacaugacccagcggguggucaucgcgcugcucgugcuggccgugggccccgccuacuccgcccacugcaucgggaucacggaccgcgacuucaucgagggcguccacgggggcaccugggugagcgcgacccuggagcaggacaagugcgugaccgucauggcccccgacaagcccucccucgacaucagccuggagacgguggccaucgaccggccggccgaggugcgcaaggucugcuacaacgccgugcugacccacgugaagaucaacgacaagugccccuccaccggcgaggcgcaccucgccgaggagaacgagggggacaacgccugcaagcggaccuacagcgaccggggcugggggaacggcugcgggcuguucggcaagggcuccaucgucgccugcgccaaguucacgugcgcgaagagcaugucccuguucgagguggaccagaccaagauccaguacgucauccgcgcccagcuccacgugggggccaagcaggagaacuggaacaccgacaucaagacccugaaguucgacgcccugagcggcagccaggagguggaguucaucggguacggcaaggccacgcucgagugccagguccagaccgcgguggacuucgggaacuccuacaucgccgagauggagaccgagagcuggaucguggaccggcagugggcccaggaccugacccugcccuggcaguccggcagcggcggggucuggcgcgagaugcaccaccucguggaguucgagcccccgcacgccgccacgauccgggugcuggcgcugggcaaccaggaggggucccucaagaccgcccugaccggcgccaugcgcgucaccaaggacacgaacgacaacaaccuguacaagcuccacgggggccacgugagcugccgggugaagcuguccgcccugacccucaagggcaccagcuacaagaucugcaccgacaagauguucuucgucaagaaccccacggacaccgggcacggcaccguggugaugcaggucaagguguccaagggggcgcccugccgcaucccggugaucgucgccgacgaccugaccgccgccaucaacaagggcauccuggugaccgugaacccgaucgccagcacgaacgacgacgagguccucaucgaggugaacccccccuucggcgacuccuacaucaucguggggcggggcgacagccgccugaccuaccaguggcacaaggagggguccagcaucggcaagcuguucacccagaccaugaagggggucgagcggcuggcggugaugggcgacacggccugggacuucuccagcgccggcggguucuucaccuccgugggcaaggggauccacaccgucuucggcagcgccuuccaggggcucuucggcggccugaacuggaucaccaaggugaucaugggggccgugcugaucugggucggcaucaacacgcgcaacaugaccauguccaugagcaugauccucgugggggugaucaugauguuccugagccugggcgucggggcggaccagggcugcgccaucaacuucggcaagugaggacuaguuauaagacugacuagcccgaugggccucccaacgggcccuccuccccuccuugcaccgagauuaaucaaaggcucuuuucagagccaccaaaaaaaaaaaaaaaaaaaaaaaaaaaaaaaaaaaaaaaaaaaaaaaaaaaaaaaaaaaaaaaaagaauu

SEQ ID NO: 2172 - RNA, 2276 nt, Artificial Sequence
  mRNA product Design i-3 (hSL-A64-N5) comprising derived and/or modified sequence from YFV__NC_002031.1__X-SS-prME-XX (polyprotein: aa92-788) (opt1)
aggagaaagcuuaccaugcggggccugagcucccgcaagcggcgcagccacgacgugcucaccguccaguuccugauccuggggaugcuccugaugaccggcggggugacgcuggugcggaagaaccgcuggcuccugcugaacgucaccuccgaggaccucggcaagaccuucagcguggggaccggcaacugcacgaccaacauccuggaggccaaguacuggugccccgacuccauggaguacaacugcccgaaccugagcccccgggaggagcccgacgacaucgacugcuggugcuacggcguggagaacguccgcguggccuacgggaagugcgacuccgcgggccggagccgccggucccgccgggccaucgaccuccccacccacgagaaccacgggcugaagacccgccaggagaaguggaugacgggccggaugggggagcgccagcugcagaagaucgagcggugguucgugcgcaacccguucuucgccgucaccgcccucaccaucgccuaccuggugggcagcaacaugacccagcggguggucaucgcgcugcucgugcuggccgugggccccgccuacuccgcccacugcaucgggaucacggaccgcgacuucaucgagggcguccacgggggcaccugggugagcgcgacccuggagcaggacaagugcgugaccgucauggcccccgacaagcccucccucgacaucagccuggagacgguggccaucgaccggccggccgaggugcgcaaggucugcuacaacgccgugcugacccacgugaagaucaacgacaagugccccuccaccggcgaggcgcaccucgccgaggagaacgagggggacaacgccugcaagcggaccuacagcgaccggggcugggggaacggcugcgggcuguucggcaagggcuccaucgucgccugcgccaaguucacgugcgcgaaguccaugagccuguucgagguggaccagaccaagauccaguacgucauccgcgcccagcuccacgugggggccaagcaggagaacuggaacaccgacaucaagacccugaaguucgacgcccugagcggcagccaggagguggaguucaucggguacggcaaggccacgcucgagugccagguccagaccgcgguggacuucgggaacuccuacaucgccgagauggagaccgagagcuggaucguggaccggcagugggcccaggaccugacccugcccuggcaguccggcagcggcggggucuggcgcgagaugcaccaccucguggaguucgagcccccgcacgccgccacgauccgggugcuggcgcugggcaaccaggaggggucccucaagaccgcccugaccggcgccaugcgcgucaccaaggacacgaacgacaacaaccuguacaagcuccacgggggccacgugagcugccgggugaagcuguccgcccugacccucaagggcaccagcuacaagaucugcaccgacaagauguucuucgucaagaaccccacggacaccgggcacggcaccguggugaugcaggucaagguguccaagggggcgcccugccgcaucccggugaucgucgccgacgaccugaccgccgccaucaacaagggcauccuggugaccgugaacccgaucgccagcacgaacgacgacgagguccucaucgaggugaacccccccuucggcgacuccuacaucaucguggggcggggcgacagccgccugaccuaccaguggcacaaggagggguccagcaucggcaagcuguucacccagaccaugaagggggucgagcggcuggcggugaugggcgacacggccugggacuucuccagcgccggcggguucuucaccuccgugggcaaggggauccacaccgucuucggcagcgccuuccaggggcuguucggcggccucaacuggaucaccaaggugaucaugggggccgugcugaucugggucggcaucaacacgcgcaacaugaccauguccaugagcaugauccucgugggggugaucaugauguuccugagccugggcgucggggcggaccagggcugcgccaucaacuucggcaagugaggacuaguuauaagacugacuagcccgaugggccucccaacgggcccuccuccccuccuugcaccgagauuaaucaaaggcucuuuucagagccaccaaaaaaaaaaaaaaaaaaaaaaaaaaaaaaaaaaaaaaaaaaaaaaaaaaaaaaaaaaaaaaaaagaauu

SEQ ID NO: 2173 - RNA, 2246 nt, Artificial Sequence
  mRNA product Design i-3 (hSL-A64-N5) comprising derived and/or modified sequence from YFV__NC_002031.1__X-SS-prME (polyprotein: aa92-778) (opt1) R8491/R8492
aggagaaagcuuaccaugcggggccugagcucccgcaagcggcgcagccacgacgugcucaccguccaguuccugauccuggggaugcuccugaugaccggcggggugacgcuggugcggaagaaccgcuggcuccugcugaacgucaccuccgaggaccucggcaagaccuucagcguggggaccggcaacugcacgaccaacauccuggaggccaaguacuggugccccgacuccauggaguacaacugccccaaccugagcccccgggaggagcccgacgacaucgacugcuggugcuacggcguggagaacguccgcguggccuacgggaagugcgacuccgcgggccggagccgccggucccgccgggccaucgaccuccccacccacgagaaccacgggcugaagacccgccaggagaaguggaugacgggccggaugggggagcgccagcugcagaagaucgagcggugguucgugcgcaacccguucuucgccgucaccgcccucaccaucgccuaccuggugggcagcaacaugacccagcggguggucaucgcgcugcucgugcuggccgugggccccgccuacuccgcccacugcaucgggaucacggaccgcgacuucaucgagggcguccacgggggcaccugggugagcgcgacccuggagcaggacaagugcgugaccgucauggcccccgacaagcccucccucgacaucagccuggagacgguggccaucgaccggccggccgaggugcgcaaggucugcuacaacgccgugcugacccacgugaagaucaacgacaagugccccuccaccggcgaggcgcaccucgccgaggagaacgagggggacaacgccugcaagcggaccuacagcgaccggggcugggggaacggcugcgggcuguucggcaagggcuccaucgucgccugcgccaaguucacgugcgcgaaguccaugagccuguucgagguggaccagaccaagauccaguacgucauccgcgcccagcuccacgugggggccaagcaggagaacuggaacaccgacaucaagacccugaaguucgacgcccugagcggcagccaggagguggaguucaucggguacggcaaggccacgcucgagugccagguccagaccgcgguggacuucgggaacuccuacaucgccgagauggagaccgagagcuggaucguggaccggcagugggcccaggaccugacccugcccuggcaguccggcagcggcggggucuggcgcgagaugcaccaccucguggaguucgagcccccgcacgccgccacgauccgggugcuggcgcugggcaaccaggaggggucccucaagaccgcccugaccggcgccaugcgcgucaccaaggacacgaacgacaacaaccuguacaagcuccacgggggccacgugagcugccgggugaagcuguccgcccugacccucaagggcaccagcuacaagaucugcaccgacaagauguucuucgucaagaaccccacggacaccgggcacggcaccguggugaugcaggucaagguguccaagggggcgcccugccgcaucccggugaucgucgccgacgaccugaccgccgccaucaacaagggcauccuggugaccgugaacccgaucgccagcacgaacgacgacgagguccucaucgaggugaacccgcccuucggcgacuccuacaucaucguggggcggggcgacagccgccugaccuaccaguggcacaaggagggguccagcaucggcaagcuguucacccagaccaugaagggggucgagcggcuggcggugaugggcgacacggccugggacuucuccagcgccggcggguucuucaccuccgugggcaaggggauccacaccgucuucggcagcgccuuccaggggcuguucggcggccucaacuggaucaccaaggugaucaugggggccgugcugaucugggucggcaucaacacgcgcaacaugaccauguccaugagcaugauccucgugggggugaucaugauguuccugagccugggcgucggggcgugaggacuaguuauaagacugacuagcccgaugggccucccaacgggcccuccuccccuccuugcaccgagauuaaucaaaggcucuuuucagagccaccaaaaaaaaaaaaaaaaaaaaaaaaaaaaaaaaaaaaaaaaaaaaaaaaaaaaaaaaaaaaaaaaagaauu

SEQ ID NO: 2174 - RNA, 2249 nt, Artificial Sequence
  mRNA product Design i-3 (hSL-A64-N5) comprising derived and/or modified sequence from YFV__NC_002031.1__SSjev(V3)-prME-XX (polyprotein: aa122-788) (opt1) R8488/R8489
aggagaaagcuuaccaugaacgagggcagcaucauguggcuggccucccucgccguggucaucgcgugcgccggggccgugacgcuggugcggaagaaccgcuggcuccugcugaacgucaccuccgaggaccucggcaagaccuucagcguggggaccggcaacugcacgaccaacauccuggaggccaaguacuggugccccgacuccauggaguacaacugccccaaccugagcccccgggaggagcccgacgacaucgacugcuggugcuacggcguggagaacguccgcguggccuacgggaagugcgacuccgcgggccggagccgccggucccgccgggccaucgaccuccccacccacgagaaccacgggcugaagacccgccaggagaaguggaugacgggccggaugggggagcgccagcugcagaagaucgagcggugguucgugcgcaacccguucuucgccgucaccgcccucaccaucgccuaccuggugggcagcaacaugacccagcggguggucaucgcgcugcucgugcuggccgugggccccgccuacuccgcccacugcaucgggaucacggaccgcgacuucaucgagggcguccacgggggcaccugggugagcgcgacccuggagcaggacaagugcgugaccgucauggcccccgacaagcccucccucgacaucagccuggagacgguggccaucgaccggccggccgaggugcgcaaggucugcuacaacgccgugcugacccacgugaagaucaacgacaagugccccuccaccggcgaggcgcaccucgccgaggagaacgagggggacaacgccugcaagcggaccuacagcgaccggggcugggggaacggcugcgggcuguucggcaagggcuccaucgucgccugcgccaaguucacgugcgcgaaguccaugagccuguucgagguggaccagaccaagauccaguacgucauccgcgcccagcuccacgugggggccaagcaggagaacuggaacaccgacaucaagacccugaaguucgacgcccugagcggcagccaggagguggaguucaucggguacggcaaggccacgcucgagugccagguccagaccgcgguggacuucgggaacuccuacaucgccgagauggagaccgagagcuggaucguggaccggcagugggcccaggaccugacccugcccuggcaguccggcagcggcggggucuggcgcgagaugcaccaccucguggaguucgagcccccgcacgccgccacgauccgggugcuggcgcugggcaaccaggaggggucccucaagaccgcccugaccggcgccaugcgcgucaccaaggacacgaacgacaacaaccuguacaagcuccacgggggccacgugagcugccgggugaagcuguccgcccugacccucaagggcaccagcuacaagaucugcaccgacaagauguucuucgucaagaaccccacggacaccgggcacggcaccguggugaugcaggucaagguguccaagggggcgcccugccgcaucccggugaucgucgccgacgaccugaccgccgccaucaacaagggcauccuggugaccgugaacccgaucgccagcacgaacgacgacgagguccucaucgaggugaacccgcccuucggcgacuccuacaucaucguggggcggggcgacagccgccugaccuaccaguggcacaaggagggguccagcaucggcaagcuguucacccagaccaugaagggggucgagcggcuggcggugaugggcgacacggccugggacuucuccagcgccggcggguucuucaccuccgugggcaaggggauccacaccgucuucggcagcgccuuccaggggcuguucggcggccucaacuggaucaccaaggugaucaugggggccgugcugaucugggucggcaucaacacgcgcaacaugaccauguccaugagcaugauccucgugggggugaucaugauguuccugagccugggcgucggggcggaccagggcugcgccaucaacuucggcaagugaggacuaguuauaagacugacuagcccgaugggccucccaacgggcccuccuccccuccuugcaccgagauuaaucaaaggcucuuuucagagccaccaaaaaaaaaaaaaaaaaaaaaaaaaaaaaaaaaaaaaaaaaaaaaaaaaaaaaaaaaaaaaaaaagaauu

SEQ ID NO: 2175 - RNA, 2258 nt, Artificial Sequence
  mRNA product Design i-3 (hSL-A64-N5) comprising derived and/or modified sequence from YFV__NC_002031.1__X-SS-prMEdelstem_TM-JEV (polyprotein: aa92-681) (opt1) R8494/R8495
aggagaaagcuuaccaugcggggccugagcucccgcaagcggcgcagccacgacgugcucaccguccaguuccugauccuggggaugcuccugaugaccggcggggugacgcuggugcggaagaaccgcuggcuccugcugaacgucaccuccgaggaccucggcaagaccuucagcguggggaccggcaacugcacgaccaacauccuggaggccaaguacuggugccccgacuccauggaguacaacugccccaaccugagcccccgggaggagcccgacgacaucgacugcuggugcuacggcguggagaacguccgcguggccuacgggaagugcgacuccgcgggccggagccgccggucccgccgggccaucgaccuccccacccacgagaaccacgggcugaagacccgccaggagaaguggaugacgggccggaugggggagcgccagcugcagaagaucgagcggugguucgugcgcaacccguucuucgccgucaccgcccucaccaucgccuaccuggugggcagcaacaugacccagcggguggucaucgcgcugcucgugcuggccgugggccccgccuacuccgcccacugcaucgggaucacggaccgcgacuucaucgagggcguccacgggggcaccugggugagcgcgacccuggagcaggacaagugcgugaccgucauggcccccgacaagcccucccucgacaucagccuggagacgguggccaucgaccggccggccgaggugcgcaaggucugcuacaacgccgugcugacccacgugaagaucaacgacaagugccccuccaccggcgaggcgcaccucgccgaggagaacgagggggacaacgccugcaagcggaccuacagcgaccggggcugggggaacggcugcgggcuguucggcaagggcuccaucgucgccugcgccaaguucacgugcgcgaaguccaugagccuguucgagguggaccagaccaagauccaguacgucauccgcgcccagcuccacgugggggccaagcaggagaacuggaacaccgacaucaagacccugaaguucgacgcccugagcggcagccaggagguggaguucaucggguacggcaaggccacgcucgagugccagguccagaccgcgguggacuucgggaacuccuacaucgccgagauggagaccgagagcuggaucguggaccggcagugggcccaggaccugacccugcccuggcaguccggcagcggcggggucuggcgcgagaugcaccaccucguggaguucgagcccccgcacgccgccacgauccgggugcuggcgcugggcaaccaggaggggucccucaagaccgcccugaccggcgccaugcgcgucaccaaggacacgaacgacaacaaccuguacaagcuccacgggggccacgugagcugccgggugaagcuguccgcccugacccucaagggcaccagcuacaagaucugcaccgacaagauguucuucgucaagaaccccacggacaccgggcacggcaccguggugaugcaggucaagguguccaagggggcgcccugccgcaucccggugaucgucgccgacgaccugaccgccgccaucaacaagggcauccuggugaccgugaacccgaucgccagcacgaacgacgacgagguccucaucgaggugaacccgcccuucggcgacuccuacaucaucguggggcggggcgacagccgccugaccuaccaguggcacaaggagggguccagcaucggaagcacgcugggcaaggccuuuucaacaacuuugaagggagcucaaagacuggcagcguugggcgacacagccugggacuuuggcucuauuggaggggucuucaacuccauagguagagccguucaccaaguguuuggaggugccuucagaacacucuuugggggaaugucuuggaucacacaagggcuaaugggugcccuacugcucuggaugggcgucaacgcacgagaccgaucaauugcuuuggccuucuuagccacaggaggugugcucguguucuuagcgaccaaugugcacgccugaggacuaguuauaagacugacuagcccgaugggccucccaacgggcccuccuccccuccuugcaccgagauuaaucaaaggcucuuuucagagccaccaaaaaaaaaaaaaaaaaaaaaaaaaaaaaaaaaaaaaaaaaaaaaaaaaaaaaaaaaaaaaaaaagaauu

SEQ ID NO: 2176 - RNA, 2231 nt, Artificial Sequence
  mRNA product Design i-3 (hSL-A64-N5) comprising derived and/or modified sequence from YFV__NC_002031.1__SSjev(V3)-prMEdelstem_TM-JEV (polyprotein: aa122-681) (opt1) R8497/R8498
aggagaaagcuuaccaugaacgagggcagcaucauguggcuggccucccucgccguggucaucgcgugcgccggggccgugacgcuggugcggaagaaccgcuggcuccugcugaacgucaccuccgaggaccucggcaagaccuucagcguggggaccggcaacugcacgaccaacauccuggaggccaaguacuggugccccgacuccauggaguacaacugccccaaccugagcccccgggaggagcccgacgacaucgacugcuggugcuacggcguggagaacguccgcguggccuacgggaagugcgacuccgcgggccggagccgccggucccgccgggccaucgaccuccccacccacgagaaccacgggcugaagacccgccaggagaaguggaugacgggccggaugggggagcgccagcugcagaagaucgagcggugguucgugcgcaacccguucuucgccgucaccgcccucaccaucgccuaccuggugggcagcaacaugacccagcggguggucaucgcgcugcucgugcuggccgugggccccgccuacuccgcccacugcaucgggaucacggaccgcgacuucaucgagggcguccacgggggcaccugggugagcgcgacccuggagcaggacaagugcgugaccgucauggcccccgacaagcccucccucgacaucagccuggagacgguggccaucgaccggccggccgaggugcgcaaggucugcuacaacgccgugcugacccacgugaagaucaacgacaagugccccuccaccggcgaggcgcaccucgccgaggagaacgagggggacaacgccugcaagcggaccuacagcgaccggggcugggggaacggcugcgggcuguucggcaagggcuccaucgucgccugcgccaaguucacgugcgcgaaguccaugagccuguucgagguggaccagaccaagauccaguacgucauccgcgcccagcuccacgugggggccaagcaggagaacuggaacaccgacaucaagacccugaaguucgacgcccugagcggcagccaggagguggaguucaucggguacggcaaggccacgcucgagugccagguccagaccgcgguggacuucgggaacuccuacaucgccgagauggagaccgagagcuggaucguggaccggcagugggcccaggaccugacccugcccuggcaguccggcagcggcggggucuggcgcgagaugcaccaccucguggaguucgagcccccgcacgccgccacgauccgggugcuggcgcugggcaaccaggaggggucccucaagaccgcccugaccggcgccaugcgcgucaccaaggacacgaacgacaacaaccuguacaagcuccacgggggccacgugagcugccgggugaagcuguccgcccugacccucaagggcaccagcuacaagaucugcaccgacaagauguucuucgucaagaaccccacggacaccgggcacggcaccguggugaugcaggucaagguguccaagggggcgcccugccgcaucccggugaucgucgccgacgaccugaccgccgccaucaacaagggcauccuggugaccgugaacccgaucgccagcacgaacgacgacgagguccucaucgaggugaacccgcccuucggcgacuccuacaucaucguggggcggggcgacagccgccugaccuaccaguggcacaaggagggguccagcaucggcagcacccuggggaaggccuucuccaccacgcucaagggcgcccagcgccuggcggcccugggggacaccgccugggacuucggcagcaucgggggcguguucaacuccaucggccgggccguccaccagguguucgggggcgccuuccgcacccucuucgggggcaugagcuggaucacccaggggcugaugggcgcgcugcuccuguggaugggggugaacgcccgggaccgcuccaucgcccuggccuuccucgcgacgggcggcguccugguguuccuggccaccaacgugcacgccugaggacuaguuauaagacugacuagcccgaugggccucccaacgggcccuccuccccuccuugcaccgagauuaaucaaaggcucuuuucagagccaccaaaaaaaaaaaaaaaaaaaaaaaaaaaaaaaaaaaaaaaaaaaaaaaaaaaaaaaaaaaaaaaaagaauu

SEQ ID NO: 2177 - RNA, 2346 nt, Artificial Sequence
  mRNA product Design a-1 (A64-N5-hSL-N5) comprising derived and/or modified sequence from YFV__NC_002031.1__X-SS-prME-XX (polyprotein: aa92-788) (opt1)
aggagagucccgcagucggcguccagcggcucugcuuguucgugugugugucguugcaggccuuauucaagcuuaccaugcggggccugagcucccgcaagcggcgcagccacgacgugcucaccguccaguuccugauccuggggaugcuccugaugaccggcggggugacgcuggugcggaagaaccgcuggcuccugcugaacgucaccuccgaggaccucggcaagaccuucagcguggggaccggcaacugcacgaccaacauccuggaggccaaguacuggugccccgacuccauggaguacaacugcccgaaccugagcccccgggaggagcccgacgacaucgacugcuggugcuacggcguggagaacguccgcguggccuacgggaagugcgacuccgcgggccggagccgccggucccgccgggccaucgaccuccccacccacgagaaccacgggcugaagacccgccaggagaaguggaugacgggccggaugggggagcgccagcugcagaagaucgagcggugguucgugcgcaacccguucuucgccgucaccgcccucaccaucgccuaccuggugggcagcaacaugacccagcggguggucaucgcgcugcucgugcuggccgugggccccgccuacuccgcccacugcaucgggaucacggaccgcgacuucaucgagggcguccacgggggcaccugggugagcgcgacccuggagcaggacaagugcgugaccgucauggcccccgacaagcccucccucgacaucagccuggagacgguggccaucgaccggccggccgaggugcgcaaggucugcuacaacgccgugcugacccacgugaagaucaacgacaagugccccuccaccggcgaggcgcaccucgccgaggagaacgagggggacaacgccugcaagcggaccuacagcgaccggggcugggggaacggcugcgggcuguucggcaagggcuccaucgucgccugcgccaaguucacgugcgcgaagagcaugucccuguucgagguggaccagaccaagauccaguacgucauccgcgcccagcuccacgugggggccaagcaggagaacuggaacaccgacaucaagacccugaaguucgacgcccugagcggcagccaggagguggaguucaucggguacggcaaggccacgcucgagugccagguccagaccgcgguggacuucgggaacuccuacaucgccgagauggagaccgagagcuggaucguggaccggcagugggcccaggaccugacccugcccuggcaguccggcagcggcggggucuggcgcgagaugcaccaccucguggaguucgagcccccgcacgccgccacgauccgggugcuggcgcugggcaaccaggaggggucccucaagaccgcccugaccggcgccaugcgcgucaccaaggacacgaacgacaacaaccuguacaagcuccacgggggccacgugagcugccgggugaagcuguccgcccugacccucaagggcaccagcuacaagaucugcaccgacaagauguucuucgucaagaaccccacggacaccgggcacggcaccguggugaugcaggucaagguguccaagggggcgcccugccgcaucccggugaucgucgccgacgaccugaccgccgccaucaacaagggcauccuggugaccgugaacccgaucgccagcacgaacgacgacgagguccucaucgaggugaacccccccuucggcgacuccuacaucaucguggggcggggcgacagccgccugaccuaccaguggcacaaggagggguccagcaucggcaagcuguucacccagaccaugaagggggucgagcggcuggcggugaugggcgacacggccugggacuucuccagcgccggcggguucuucaccuccgugggcaaggggauccacaccgucuucggcagcgccuuccaggggcucuucggcggccugaacuggaucaccaaggugaucaugggggccgugcugaucugggucggcaucaacacgcgcaacaugaccauguccaugagcaugauccucgugggggugaucaugauguuccugagccugggcgucggggcggaccagggcugcgccaucaacuucggcaagugaggacuagucccuguucccagagcccacuuuuuuuucuuuuuuugaaauaaaauagccugucuuucauuaauagaucuaaaaaaaaaaaaaaaaaaaaaaaaaaaaaaaaaaaaaaaaaaaaaaaaaaaaaaaaaaaaaaaaugcaucaaaggcucuuuucagagccaccagaauu

SEQ ID NO: 2178 - RNA, 2346 nt, Artificial Sequence
  mRNA product Design a-1 (A64-N5-hSL-N5) comprising derived and/or modified sequence from YFV__NC_002031.1__X-SS-prME-XX (polyprotein: aa92-788) (opt1)
aggagagucccgcagucggcguccagcggcucugcuuguucgugugugugucguugcaggccuuauucaagcuuaccaugcggggccugagcucccgcaagcggcgcagccacgacgugcucaccguccaguuccugauccuggggaugcuccugaugaccggcggggugacgcuggugcggaagaaccgcuggcuccugcugaacgucaccuccgaggaccucggcaagaccuucagcguggggaccggcaacugcacgaccaacauccuggaggccaaguacuggugccccgacuccauggaguacaacugcccgaaccugagcccccgggaggagcccgacgacaucgacugcuggugcuacggcguggagaacguccgcguggccuacgggaagugcgacuccgcgggccggagccgccggucccgccgggccaucgaccuccccacccacgagaaccacgggcugaagacccgccaggagaaguggaugacgggccggaugggggagcgccagcugcagaagaucgagcggugguucgugcgcaacccguucuucgccgucaccgcccucaccaucgccuaccuggugggcagcaacaugacccagcggguggucaucgcgcugcucgugcuggccgugggccccgccuacuccgcccacugcaucgggaucacggaccgcgacuucaucgagggcguccacgggggcaccugggugagcgcgacccuggagcaggacaagugcgugaccgucauggcccccgacaagcccucccucgacaucagccuggagacgguggccaucgaccggccggccgaggugcgcaaggucugcuacaacgccgugcugacccacgugaagaucaacgacaagugccccuccaccggcgaggcgcaccucgccgaggagaacgagggggacaacgccugcaagcggaccuacagcgaccggggcugggggaacggcugcgggcuguucggcaagggcuccaucgucgccugcgccaaguucacgugcgcgaaguccaugagccuguucgagguggaccagaccaagauccaguacgucauccgcgcccagcuccacgugggggccaagcaggagaacuggaacaccgacaucaagacccugaaguucgacgcccugagcggcagccaggagguggaguucaucggguacggcaaggccacgcucgagugccagguccagaccgcgguggacuucgggaacuccuacaucgccgagauggagaccgagagcuggaucguggaccggcagugggcccaggaccugacccugcccuggcaguccggcagcggcggggucuggcgcgagaugcaccaccucguggaguucgagcccccgcacgccgccacgauccgggugcuggcgcugggcaaccaggaggggucccucaagaccgcccugaccggcgccaugcgcgucaccaaggacacgaacgacaacaaccuguacaagcuccacgggggccacgugagcugccgggugaagcuguccgcccugacccucaagggcaccagcuacaagaucugcaccgacaagauguucuucgucaagaaccccacggacaccgggcacggcaccguggugaugcaggucaagguguccaagggggcgcccugccgcaucccggugaucgucgccgacgaccugaccgccgccaucaacaagggcauccuggugaccgugaacccgaucgccagcacgaacgacgacgagguccucaucgaggugaacccccccuucggcgacuccuacaucaucguggggcggggcgacagccgccugaccuaccaguggcacaaggagggguccagcaucggcaagcuguucacccagaccaugaagggggucgagcggcuggcggugaugggcgacacggccugggacuucuccagcgccggcggguucuucaccuccgugggcaaggggauccacaccgucuucggcagcgccuuccaggggcuguucggcggccucaacuggaucaccaaggugaucaugggggccgugcugaucugggucggcaucaacacgcgcaacaugaccauguccaugagcaugauccucgugggggugaucaugauguuccugagccugggcgucggggcggaccagggcugcgccaucaacuucggcaagugaggacuagucccuguucccagagcccacuuuuuuuucuuuuuuugaaauaaaauagccugucuuucauuaauagaucuaaaaaaaaaaaaaaaaaaaaaaaaaaaaaaaaaaaaaaaaaaaaaaaaaaaaaaaaaaaaaaaaugcaucaaaggcucuuuucagagccaccagaauu

SEQ ID NO: 2179 - RNA, 2316 nt, Artificial Sequence
  mRNA product Design a-1 (A64-N5-hSL-N5) comprising derived and/or modified sequence from YFV__NC_002031.1__X-SS-prME (polyprotein: aa92-778) (opt1)
aggagagucccgcagucggcguccagcggcucugcuuguucgugugugugucguugcaggccuuauucaagcuuaccaugcggggccugagcucccgcaagcggcgcagccacgacgugcucaccguccaguuccugauccuggggaugcuccugaugaccggcggggugacgcuggugcggaagaaccgcuggcuccugcugaacgucaccuccgaggaccucggcaagaccuucagcguggggaccggcaacugcacgaccaacauccuggaggccaaguacuggugccccgacuccauggaguacaacugccccaaccugagcccccgggaggagcccgacgacaucgacugcuggugcuacggcguggagaacguccgcguggccuacgggaagugcgacuccgcgggccggagccgccggucccgccgggccaucgaccuccccacccacgagaaccacgggcugaagacccgccaggagaaguggaugacgggccggaugggggagcgccagcugcagaagaucgagcggugguucgugcgcaacccguucuucgccgucaccgcccucaccaucgccuaccuggugggcagcaacaugacccagcggguggucaucgcgcugcucgugcuggccgugggccccgccuacuccgcccacugcaucgggaucacggaccgcgacuucaucgagggcguccacgggggcaccugggugagcgcgacccuggagcaggacaagugcgugaccgucauggcccccgacaagcccucccucgacaucagccuggagacgguggccaucgaccggccggccgaggugcgcaaggucugcuacaacgccgugcugacccacgugaagaucaacgacaagugccccuccaccggcgaggcgcaccucgccgaggagaacgagggggacaacgccugcaagcggaccuacagcgaccggggcugggggaacggcugcgggcuguucggcaagggcuccaucgucgccugcgccaaguucacgugcgcgaaguccaugagccuguucgagguggaccagaccaagauccaguacgucauccgcgcccagcuccacgugggggccaagcaggagaacuggaacaccgacaucaagacccugaaguucgacgcccugagcggcagccaggagguggaguucaucggguacggcaaggccacgcucgagugccagguccagaccgcgguggacuucgggaacuccuacaucgccgagauggagaccgagagcuggaucguggaccggcagugggcccaggaccugacccugcccuggcaguccggcagcggcggggucuggcgcgagaugcaccaccucguggaguucgagcccccgcacgccgccacgauccgggugcuggcgcugggcaaccaggaggggucccucaagaccgcccugaccggcgccaugcgcgucaccaaggacacgaacgacaacaaccuguacaagcuccacgggggccacgugagcugccgggugaagcuguccgcccugacccucaagggcaccagcuacaagaucugcaccgacaagauguucuucgucaagaaccccacggacaccgggcacggcaccguggugaugcaggucaagguguccaagggggcgcccugccgcaucccggugaucgucgccgacgaccugaccgccgccaucaacaagggcauccuggugaccgugaacccgaucgccagcacgaacgacgacgagguccucaucgaggugaacccgcccuucggcgacuccuacaucaucguggggcggggcgacagccgccugaccuaccaguggcacaaggagggguccagcaucggcaagcuguucacccagaccaugaagggggucgagcggcuggcggugaugggcgacacggccugggacuucuccagcgccggcggguucuucaccuccgugggcaaggggauccacaccgucuucggcagcgccuuccaggggcuguucggcggccucaacuggaucaccaaggugaucaugggggccgugcugaucugggucggcaucaacacgcgcaacaugaccauguccaugagcaugauccucgugggggugaucaugauguuccugagccugggcgucggggcgugaggacuagucccuguucccagagcccacuuuuuuuucuuuuuuugaaauaaaauagccugucuuucauuaauagaucuaaaaaaaaaaaaaaaaaaaaaaaaaaaaaaaaaaaaaaaaaaaaaaaaaaaaaaaaaaaaaaaaugcaucaaaggcucuuuucagagccaccagaauu

SEQ ID NO: 2180 - RNA, 2319 nt, Artificial Sequence
  mRNA product Design a-1 (A64-N5-hSL-N5) comprising derived and/or modified sequence from YFV__NC_002031.1__SSjev(V3)-prME-XX (polyprotein: aa122-788) (opt1)
aggagagucccgcagucggcguccagcggcucugcuuguucgugugugugucguugcaggccuuauucaagcuuaccaugaacgagggcagcaucauguggcuggccucccucgccguggucaucgcgugcgccggggccgugacgcuggugcggaagaaccgcuggcuccugcugaacgucaccuccgaggaccucggcaagaccuucagcguggggaccggcaacugcacgaccaacauccuggaggccaaguacuggugccccgacuccauggaguacaacugccccaaccugagcccccgggaggagcccgacgacaucgacugcuggugcuacggcguggagaacguccgcguggccuacgggaagugcgacuccgcgggccggagccgccggucccgccgggccaucgaccuccccacccacgagaaccacgggcugaagacccgccaggagaaguggaugacgggccggaugggggagcgccagcugcagaagaucgagcggugguucgugcgcaacccguucuucgccgucaccgcccucaccaucgccuaccuggugggcagcaacaugacccagcggguggucaucgcgcugcucgugcuggccgugggccccgccuacuccgcccacugcaucgggaucacggaccgcgacuucaucgagggcguccacgggggcaccugggugagcgcgacccuggagcaggacaagugcgugaccgucauggcccccgacaagcccucccucgacaucagccuggagacgguggccaucgaccggccggccgaggugcgcaaggucugcuacaacgccgugcugacccacgugaagaucaacgacaagugccccuccaccggcgaggcgcaccucgccgaggagaacgagggggacaacgccugcaagcggaccuacagcgaccggggcugggggaacggcugcgggcuguucggcaagggcuccaucgucgccugcgccaaguucacgugcgcgaaguccaugagccuguucgagguggaccagaccaagauccaguacgucauccgcgcccagcuccacgugggggccaagcaggagaacuggaacaccgacaucaagacccugaaguucgacgcccugagcggcagccaggagguggaguucaucggguacggcaaggccacgcucgagugccagguccagaccgcgguggacuucgggaacuccuacaucgccgagauggagaccgagagcuggaucguggaccggcagugggcccaggaccugacccugcccuggcaguccggcagcggcggggucuggcgcgagaugcaccaccucguggaguucgagcccccgcacgccgccacgauccgggugcuggcgcugggcaaccaggaggggucccucaagaccgcccugaccggcgccaugcgcgucaccaaggacacgaacgacaacaaccuguacaagcuccacgggggccacgugagcugccgggugaagcuguccgcccugacccucaagggcaccagcuacaagaucugcaccgacaagauguucuucgucaagaaccccacggacaccgggcacggcaccguggugaugcaggucaagguguccaagggggcgcccugccgcaucccggugaucgucgccgacgaccugaccgccgccaucaacaagggcauccuggugaccgugaacccgaucgccagcacgaacgacgacgagguccucaucgaggugaacccgcccuucggcgacuccuacaucaucguggggcggggcgacagccgccugaccuaccaguggcacaaggagggguccagcaucggcaagcuguucacccagaccaugaagggggucgagcggcuggcggugaugggcgacacggccugggacuucuccagcgccggcggguucuucaccuccgugggcaaggggauccacaccgucuucggcagcgccuuccaggggcuguucggcggccucaacuggaucaccaaggugaucaugggggccgugcugaucugggucggcaucaacacgcgcaacaugaccauguccaugagcaugauccucgugggggugaucaugauguuccugagccugggcgucggggcggaccagggcugcgccaucaacuucggcaagugaggacuagucccuguucccagagcccacuuuuuuuucuuuuuuugaaauaaaauagccugucuuucauuaauagaucuaaaaaaaaaaaaaaaaaaaaaaaaaaaaaaaaaaaaaaaaaaaaaaaaaaaaaaaaaaaaaaaaugcaucaaaggcucuuuucagagccaccagaauu

SEQ ID NO: 2181 - RNA, 2328 nt, Artificial Sequence
  mRNA product Design a-1 (A64-N5-hSL-N5) comprising derived and/or modified sequence from YFV__NC_002031.1__X-SS-prMEdelstem_TM-JEV (polyprotein: aa92-681) (opt1)
aggagagucccgcagucggcguccagcggcucugcuuguucgugugugugucguugcaggccuuauucaagcuuaccaugcggggccugagcucccgcaagcggcgcagccacgacgugcucaccguccaguuccugauccuggggaugcuccugaugaccggcggggugacgcuggugcggaagaaccgcuggcuccugcugaacgucaccuccgaggaccucggcaagaccuucagcguggggaccggcaacugcacgaccaacauccuggaggccaaguacuggugccccgacuccauggaguacaacugccccaaccugagcccccgggaggagcccgacgacaucgacugcuggugcuacggcguggagaacguccgcguggccuacgggaagugcgacuccgcgggccggagccgccggucccgccgggccaucgaccuccccacccacgagaaccacgggcugaagacccgccaggagaaguggaugacgggccggaugggggagcgccagcugcagaagaucgagcggugguucgugcgcaacccguucuucgccgucaccgcccucaccaucgccuaccuggugggcagcaacaugacccagcggguggucaucgcgcugcucgugcuggccgugggccccgccuacuccgcccacugcaucgggaucacggaccgcgacuucaucgagggcguccacgggggcaccugggugagcgcgacccuggagcaggacaagugcgugaccgucauggcccccgacaagcccucccucgacaucagccuggagacgguggccaucgaccggccggccgaggugcgcaaggucugcuacaacgccgugcugacccacgugaagaucaacgacaagugccccuccaccggcgaggcgcaccucgccgaggagaacgagggggacaacgccugcaagcggaccuacagcgaccggggcugggggaacggcugcgggcuguucggcaagggcuccaucgucgccugcgccaaguucacgugcgcgaaguccaugagccuguucgagguggaccagaccaagauccaguacgucauccgcgcccagcuccacgugggggccaagcaggagaacuggaacaccgacaucaagacccugaaguucgacgcccugagcggcagccaggagguggaguucaucggguacggcaaggccacgcucgagugccagguccagaccgcgguggacuucgggaacuccuacaucgccgagauggagaccgagagcuggaucguggaccggcagugggcccaggaccugacccugcccuggcaguccggcagcggcggggucuggcgcgagaugcaccaccucguggaguucgagcccccgcacgccgccacgauccgggugcuggcgcugggcaaccaggaggggucccucaagaccgcccugaccggcgccaugcgcgucaccaaggacacgaacgacaacaaccuguacaagcuccacgggggccacgugagcugccgggugaagcuguccgcccugacccucaagggcaccagcuacaagaucugcaccgacaagauguucuucgucaagaaccccacggacaccgggcacggcaccguggugaugcaggucaagguguccaagggggcgcccugccgcaucccggugaucgucgccgacgaccugaccgccgccaucaacaagggcauccuggugaccgugaacccgaucgccagcacgaacgacgacgagguccucaucgaggugaacccgcccuucggcgacuccuacaucaucguggggcggggcgacagccgccugaccuaccaguggcacaaggagggguccagcaucggaagcacgcugggcaaggccuuuucaacaacuuugaagggagcucaaagacuggcagcguugggcgacacagccugggacuuuggcucuauuggaggggucuucaacuccauagguagagccguucaccaaguguuuggaggugccuucagaacacucuuugggggaaugucuuggaucacacaagggcuaaugggugcccuacugcucuggaugggcgucaacgcacgagaccgaucaauugcuuuggccuucuuagccacaggaggugugcucguguucuuagcgaccaaugugcacgccugaggacuagucccuguucccagagcccacuuuuuuuucuuuuuuugaaauaaaauagccugucuuucauuaauagaucuaaaaaaaaaaaaaaaaaaaaaaaaaaaaaaaaaaaaaaaaaaaaaaaaaaaaaaaaaaaaaaaaugcaucaaaggcucuuuucagagccaccagaauu

SEQ ID NO: 2182 - RNA, 2301 nt, Artificial Sequence
  mRNA product Design a-1 (A64-N5-hSL-N5) comprising derived and/or modified sequence from YFV__NC_002031.1__SSjev(V3)-prMEdelstem_TM-JEV (polyprotein: aa122-681) (opt1)
aggagagucccgcagucggcguccagcggcucugcuuguucgugugugugucguugcaggccuuauucaagcuuaccaugaacgagggcagcaucauguggcuggccucccucgccguggucaucgcgugcgccggggccgugacgcuggugcggaagaaccgcuggcuccugcugaacgucaccuccgaggaccucggcaagaccuucagcguggggaccggcaacugcacgaccaacauccuggaggccaaguacuggugccccgacuccauggaguacaacugccccaaccugagcccccgggaggagcccgacgacaucgacugcuggugcuacggcguggagaacguccgcguggccuacgggaagugcgacuccgcgggccggagccgccggucccgccgggccaucgaccuccccacccacgagaaccacgggcugaagacccgccaggagaaguggaugacgggccggaugggggagcgccagcugcagaagaucgagcggugguucgugcgcaacccguucuucgccgucaccgcccucaccaucgccuaccuggugggcagcaacaugacccagcggguggucaucgcgcugcucgugcuggccgugggccccgccuacuccgcccacugcaucgggaucacggaccgcgacuucaucgagggcguccacgggggcaccugggugagcgcgacccuggagcaggacaagugcgugaccgucauggcccccgacaagcccucccucgacaucagccuggagacgguggccaucgaccggccggccgaggugcgcaaggucugcuacaacgccgugcugacccacgugaagaucaacgacaagugccccuccaccggcgaggcgcaccucgccgaggagaacgagggggacaacgccugcaagcggaccuacagcgaccggggcugggggaacggcugcgggcuguucggcaagggcuccaucgucgccugcgccaaguucacgugcgcgaaguccaugagccuguucgagguggaccagaccaagauccaguacgucauccgcgcccagcuccacgugggggccaagcaggagaacuggaacaccgacaucaagacccugaaguucgacgcccugagcggcagccaggagguggaguucaucggguacggcaaggccacgcucgagugccagguccagaccgcgguggacuucgggaacuccuacaucgccgagauggagaccgagagcuggaucguggaccggcagugggcccaggaccugacccugcccuggcaguccggcagcggcggggucuggcgcgagaugcaccaccucguggaguucgagcccccgcacgccgccacgauccgggugcuggcgcugggcaaccaggaggggucccucaagaccgcccugaccggcgccaugcgcgucaccaaggacacgaacgacaacaaccuguacaagcuccacgggggccacgugagcugccgggugaagcuguccgcccugacccucaagggcaccagcuacaagaucugcaccgacaagauguucuucgucaagaaccccacggacaccgggcacggcaccguggugaugcaggucaagguguccaagggggcgcccugccgcaucccggugaucgucgccgacgaccugaccgccgccaucaacaagggcauccuggugaccgugaacccgaucgccagcacgaacgacgacgagguccucaucgaggugaacccgcccuucggcgacuccuacaucaucguggggcggggcgacagccgccugaccuaccaguggcacaaggagggguccagcaucggcagcacccuggggaaggccuucuccaccacgcucaagggcgcccagcgccuggcggcccugggggacaccgccugggacuucggcagcaucgggggcguguucaacuccaucggccgggccguccaccagguguucgggggcgccuuccgcacccucuucgggggcaugagcuggaucacccaggggcugaugggcgcgcugcuccuguggaugggggugaacgcccgggaccgcuccaucgcccuggccuuccucgcgacgggcggcguccugguguuccuggccaccaacgugcacgccugaggacuagucccuguucccagagcccacuuuuuuuucuuuuuuugaaauaaaauagccugucuuucauuaauagaucuaaaaaaaaaaaaaaaaaaaaaaaaaaaaaaaaaaaaaaaaaaaaaaaaaaaaaaaaaaaaaaaaugcaucaaaggcucuuuucagagccaccagaauu

SEQ ID NO: 2183 - RNA, 2287 nt, Artificial Sequence
  mRNA product Design i-3 (A64-N5-hSL-N5) comprising derived and/or modified sequence from YFV__NC_002031.1__X-SS-prME-XX (polyprotein: aa92-788) (opt1) R8484
aggagaaagcuuaccaugcggggccugagcucccgcaagcggcgcagccacgacgugcucaccguccaguuccugauccuggggaugcuccugaugaccggcggggugacgcuggugcggaagaaccgcuggcuccugcugaacgucaccuccgaggaccucggcaagaccuucagcguggggaccggcaacugcacgaccaacauccuggaggccaaguacuggugccccgacuccauggaguacaacugcccgaaccugagcccccgggaggagcccgacgacaucgacugcuggugcuacggcguggagaacguccgcguggccuacgggaagugcgacuccgcgggccggagccgccggucccgccgggccaucgaccuccccacccacgagaaccacgggcugaagacccgccaggagaaguggaugacgggccggaugggggagcgccagcugcagaagaucgagcggugguucgugcgcaacccguucuucgccgucaccgcccucaccaucgccuaccuggugggcagcaacaugacccagcggguggucaucgcgcugcucgugcuggccgugggccccgccuacuccgcccacugcaucgggaucacggaccgcgacuucaucgagggcguccacgggggcaccugggugagcgcgacccuggagcaggacaagugcgugaccgucauggcccccgacaagcccucccucgacaucagccuggagacgguggccaucgaccggccggccgaggugcgcaaggucugcuacaacgccgugcugacccacgugaagaucaacgacaagugccccuccaccggcgaggcgcaccucgccgaggagaacgagggggacaacgccugcaagcggaccuacagcgaccggggcugggggaacggcugcgggcuguucggcaagggcuccaucgucgccugcgccaaguucacgugcgcgaagagcaugucccuguucgagguggaccagaccaagauccaguacgucauccgcgcccagcuccacgugggggccaagcaggagaacuggaacaccgacaucaagacccugaaguucgacgcccugagcggcagccaggagguggaguucaucggguacggcaaggccacgcucgagugccagguccagaccgcgguggacuucgggaacuccuacaucgccgagauggagaccgagagcuggaucguggaccggcagugggcccaggaccugacccugcccuggcaguccggcagcggcggggucuggcgcgagaugcaccaccucguggaguucgagcccccgcacgccgccacgauccgggugcuggcgcugggcaaccaggaggggucccucaagaccgcccugaccggcgccaugcgcgucaccaaggacacgaacgacaacaaccuguacaagcuccacgggggccacgugagcugccgggugaagcuguccgcccugacccucaagggcaccagcuacaagaucugcaccgacaagauguucuucgucaagaaccccacggacaccgggcacggcaccguggugaugcaggucaagguguccaagggggcgcccugccgcaucccggugaucgucgccgacgaccugaccgccgccaucaacaagggcauccuggugaccgugaacccgaucgccagcacgaacgacgacgagguccucaucgaggugaacccccccuucggcgacuccuacaucaucguggggcggggcgacagccgccugaccuaccaguggcacaaggagggguccagcaucggcaagcuguucacccagaccaugaagggggucgagcggcuggcggugaugggcgacacggccugggacuucuccagcgccggcggguucuucaccuccgugggcaaggggauccacaccgucuucggcagcgccuuccaggggcucuucggcggccugaacuggaucaccaaggugaucaugggggccgugcugaucugggucggcaucaacacgcgcaacaugaccauguccaugagcaugauccucgugggggugaucaugauguuccugagccugggcgucggggcggaccagggcugcgccaucaacuucggcaagugaggacuaguuauaagacugacuagcccgaugggccucccaacgggcccuccuccccuccuugcaccgagauuaauagaucuaaaaaaaaaaaaaaaaaaaaaaaaaaaaaaaaaaaaaaaaaaaaaaaaaaaaaaaaaaaaaaaaugcaucaaaggcucuuuucagagccaccagaauu

SEQ ID NO: 2184 - RNA, 2287 nt, Artificial Sequence
  mRNA product Design i-3 (A64-N5-hSL-N5) comprising derived and/or modified sequence from YFV__NC_002031.1__X-SS-prME-XX (polyprotein: aa92-788) (opt1)
aggagaaagcuuaccaugcggggccugagcucccgcaagcggcgcagccacgacgugcucaccguccaguuccugauccuggggaugcuccugaugaccggcggggugacgcuggugcggaagaaccgcuggcuccugcugaacgucaccuccgaggaccucggcaagaccuucagcguggggaccggcaacugcacgaccaacauccuggaggccaaguacuggugccccgacuccauggaguacaacugcccgaaccugagcccccgggaggagcccgacgacaucgacugcuggugcuacggcguggagaacguccgcguggccuacgggaagugcgacuccgcgggccggagccgccggucccgccgggccaucgaccuccccacccacgagaaccacgggcugaagacccgccaggagaaguggaugacgggccggaugggggagcgccagcugcagaagaucgagcggugguucgugcgcaacccguucuucgccgucaccgcccucaccaucgccuaccuggugggcagcaacaugacccagcggguggucaucgcgcugcucgugcuggccgugggccccgccuacuccgcccacugcaucgggaucacggaccgcgacuucaucgagggcguccacgggggcaccugggugagcgcgacccuggagcaggacaagugcgugaccgucauggcccccgacaagcccucccucgacaucagccuggagacgguggccaucgaccggccggccgaggugcgcaaggucugcuacaacgccgugcugacccacgugaagaucaacgacaagugccccuccaccggcgaggcgcaccucgccgaggagaacgagggggacaacgccugcaagcggaccuacagcgaccggggcugggggaacggcugcgggcuguucggcaagggcuccaucgucgccugcgccaaguucacgugcgcgaaguccaugagccuguucgagguggaccagaccaagauccaguacgucauccgcgcccagcuccacgugggggccaagcaggagaacuggaacaccgacaucaagacccugaaguucgacgcccugagcggcagccaggagguggaguucaucggguacggcaaggccacgcucgagugccagguccagaccgcgguggacuucgggaacuccuacaucgccgagauggagaccgagagcuggaucguggaccggcagugggcccaggaccugacccugcccuggcaguccggcagcggcggggucuggcgcgagaugcaccaccucguggaguucgagcccccgcacgccgccacgauccgggugcuggcgcugggcaaccaggaggggucccucaagaccgcccugaccggcgccaugcgcgucaccaaggacacgaacgacaacaaccuguacaagcuccacgggggccacgugagcugccgggugaagcuguccgcccugacccucaagggcaccagcuacaagaucugcaccgacaagauguucuucgucaagaaccccacggacaccgggcacggcaccguggugaugcaggucaagguguccaagggggcgcccugccgcaucccggugaucgucgccgacgaccugaccgccgccaucaacaagggcauccuggugaccgugaacccgaucgccagcacgaacgacgacgagguccucaucgaggugaacccccccuucggcgacuccuacaucaucguggggcggggcgacagccgccugaccuaccaguggcacaaggagggguccagcaucggcaagcuguucacccagaccaugaagggggucgagcggcuggcggugaugggcgacacggccugggacuucuccagcgccggcggguucuucaccuccgugggcaaggggauccacaccgucuucggcagcgccuuccaggggcuguucggcggccucaacuggaucaccaaggugaucaugggggccgugcugaucugggucggcaucaacacgcgcaacaugaccauguccaugagcaugauccucgugggggugaucaugauguuccugagccugggcgucggggcggaccagggcugcgccaucaacuucggcaagugaggacuaguuauaagacugacuagcccgaugggccucccaacgggcccuccuccccuccuugcaccgagauuaauagaucuaaaaaaaaaaaaaaaaaaaaaaaaaaaaaaaaaaaaaaaaaaaaaaaaaaaaaaaaaaaaaaaaugcaucaaaggcucuuuucagagccaccagaauu

SEQ ID NO: 2185 - RNA, 2257 nt, Artificial Sequence
  mRNA product Design i-3 (A64-N5-hSL-N5) comprising derived and/or modified sequence from YFV__NC_002031.1__X-SS-prME (polyprotein: aa92-778) (opt1)
aggagaaagcuuaccaugcggggccugagcucccgcaagcggcgcagccacgacgugcucaccguccaguuccugauccuggggaugcuccugaugaccggcggggugacgcuggugcggaagaaccgcuggcuccugcugaacgucaccuccgaggaccucggcaagaccuucagcguggggaccggcaacugcacgaccaacauccuggaggccaaguacuggugccccgacuccauggaguacaacugccccaaccugagcccccgggaggagcccgacgacaucgacugcuggugcuacggcguggagaacguccgcguggccuacgggaagugcgacuccgcgggccggagccgccggucccgccgggccaucgaccuccccacccacgagaaccacgggcugaagacccgccaggagaaguggaugacgggccggaugggggagcgccagcugcagaagaucgagcggugguucgugcgcaacccguucuucgccgucaccgcccucaccaucgccuaccuggugggcagcaacaugacccagcggguggucaucgcgcugcucgugcuggccgugggccccgccuacuccgcccacugcaucgggaucacggaccgcgacuucaucgagggcguccacgggggcaccugggugagcgcgacccuggagcaggacaagugcgugaccgucauggcccccgacaagcccucccucgacaucagccuggagacgguggccaucgaccggccggccgaggugcgcaaggucugcuacaacgccgugcugacccacgugaagaucaacgacaagugccccuccaccggcgaggcgcaccucgccgaggagaacgagggggacaacgccugcaagcggaccuacagcgaccggggcugggggaacggcugcgggcuguucggcaagggcuccaucgucgccugcgccaaguucacgugcgcgaaguccaugagccuguucgagguggaccagaccaagauccaguacgucauccgcgcccagcuccacgugggggccaagcaggagaacuggaacaccgacaucaagacccugaaguucgacgcccugagcggcagccaggagguggaguucaucggguacggcaaggccacgcucgagugccagguccagaccgcgguggacuucgggaacuccuacaucgccgagauggagaccgagagcuggaucguggaccggcagugggcccaggaccugacccugcccuggcaguccggcagcggcggggucuggcgcgagaugcaccaccucguggaguucgagcccccgcacgccgccacgauccgggugcuggcgcugggcaaccaggaggggucccucaagaccgcccugaccggcgccaugcgcgucaccaaggacacgaacgacaacaaccuguacaagcuccacgggggccacgugagcugccgggugaagcuguccgcccugacccucaagggcaccagcuacaagaucugcaccgacaagauguucuucgucaagaaccccacggacaccgggcacggcaccguggugaugcaggucaagguguccaagggggcgcccugccgcaucccggugaucgucgccgacgaccugaccgccgccaucaacaagggcauccuggugaccgugaacccgaucgccagcacgaacgacgacgagguccucaucgaggugaacccgcccuucggcgacuccuacaucaucguggggcggggcgacagccgccugaccuaccaguggcacaaggagggguccagcaucggcaagcuguucacccagaccaugaagggggucgagcggcuggcggugaugggcgacacggccugggacuucuccagcgccggcggguucuucaccuccgugggcaaggggauccacaccgucuucggcagcgccuuccaggggcuguucggcggccucaacuggaucaccaaggugaucaugggggccgugcugaucugggucggcaucaacacgcgcaacaugaccauguccaugagcaugauccucgugggggugaucaugauguuccugagccugggcgucggggcgugaggacuaguuauaagacugacuagcccgaugggccucccaacgggcccuccuccccuccuugcaccgagauuaauagaucuaaaaaaaaaaaaaaaaaaaaaaaaaaaaaaaaaaaaaaaaaaaaaaaaaaaaaaaaaaaaaaaaugcaucaaaggcucuuuucagagccaccagaauu

SEQ ID NO: 2186 - RNA, 2260 nt, Artificial Sequence
  mRNA product Design i-3 (A64-N5-hSL-N5) comprising derived and/or modified sequence from YFV__NC_002031.1__SSjev(V3)-prME-XX (polyprotein: aa122-788) (opt1)
aggagaaagcuuaccaugaacgagggcagcaucauguggcuggccucccucgccguggucaucgcgugcgccggggccgugacgcuggugcggaagaaccgcuggcuccugcugaacgucaccuccgaggaccucggcaagaccuucagcguggggaccggcaacugcacgaccaacauccuggaggccaaguacuggugccccgacuccauggaguacaacugccccaaccugagcccccgggaggagcccgacgacaucgacugcuggugcuacggcguggagaacguccgcguggccuacgggaagugcgacuccgcgggccggagccgccggucccgccgggccaucgaccuccccacccacgagaaccacgggcugaagacccgccaggagaaguggaugacgggccggaugggggagcgccagcugcagaagaucgagcggugguucgugcgcaacccguucuucgccgucaccgcccucaccaucgccuaccuggugggcagcaacaugacccagcggguggucaucgcgcugcucgugcuggccgugggccccgccuacuccgcccacugcaucgggaucacggaccgcgacuucaucgagggcguccacgggggcaccugggugagcgcgacccuggagcaggacaagugcgugaccgucauggcccccgacaagcccucccucgacaucagccuggagacgguggccaucgaccggccggccgaggugcgcaaggucugcuacaacgccgugcugacccacgugaagaucaacgacaagugccccuccaccggcgaggcgcaccucgccgaggagaacgagggggacaacgccugcaagcggaccuacagcgaccggggcugggggaacggcugcgggcuguucggcaagggcuccaucgucgccugcgccaaguucacgugcgcgaaguccaugagccuguucgagguggaccagaccaagauccaguacgucauccgcgcccagcuccacgugggggccaagcaggagaacuggaacaccgacaucaagacccugaaguucgacgcccugagcggcagccaggagguggaguucaucggguacggcaaggccacgcucgagugccagguccagaccgcgguggacuucgggaacuccuacaucgccgagauggagaccgagagcuggaucguggaccggcagugggcccaggaccugacccugcccuggcaguccggcagcggcggggucuggcgcgagaugcaccaccucguggaguucgagcccccgcacgccgccacgauccgggugcuggcgcugggcaaccaggaggggucccucaagaccgcccugaccggcgccaugcgcgucaccaaggacacgaacgacaacaaccuguacaagcuccacgggggccacgugagcugccgggugaagcuguccgcccugacccucaagggcaccagcuacaagaucugcaccgacaagauguucuucgucaagaaccccacggacaccgggcacggcaccguggugaugcaggucaagguguccaagggggcgcccugccgcaucccggugaucgucgccgacgaccugaccgccgccaucaacaagggcauccuggugaccgugaacccgaucgccagcacgaacgacgacgagguccucaucgaggugaacccgcccuucggcgacuccuacaucaucguggggcggggcgacagccgccugaccuaccaguggcacaaggagggguccagcaucggcaagcuguucacccagaccaugaagggggucgagcggcuggcggugaugggcgacacggccugggacuucuccagcgccggcggguucuucaccuccgugggcaaggggauccacaccgucuucggcagcgccuuccaggggcuguucggcggccucaacuggaucaccaaggugaucaugggggccgugcugaucugggucggcaucaacacgcgcaacaugaccauguccaugagcaugauccucgugggggugaucaugauguuccugagccugggcgucggggcggaccagggcugcgccaucaacuucggcaagugaggacuaguuauaagacugacuagcccgaugggccucccaacgggcccuccuccccuccuugcaccgagauuaauagaucuaaaaaaaaaaaaaaaaaaaaaaaaaaaaaaaaaaaaaaaaaaaaaaaaaaaaaaaaaaaaaaaaugcaucaaaggcucuuuucagagccaccagaauu

SEQ ID NO: 2187 - RNA, 2269 nt, Artificial Sequence
  mRNA product Design i-3 (A64-N5-hSL-N5) comprising derived and/or modified sequence from YFV__NC_002031.1__X-SS-prMEdelstem_TM-JEV (polyprotein: aa92-681) (opt1)
aggagaaagcuuaccaugcggggccugagcucccgcaagcggcgcagccacgacgugcucaccguccaguuccugauccuggggaugcuccugaugaccggcggggugacgcuggugcggaagaaccgcuggcuccugcugaacgucaccuccgaggaccucggcaagaccuucagcguggggaccggcaacugcacgaccaacauccuggaggccaaguacuggugccccgacuccauggaguacaacugccccaaccugagcccccgggaggagcccgacgacaucgacugcuggugcuacggcguggagaacguccgcguggccuacgggaagugcgacuccgcgggccggagccgccggucccgccgggccaucgaccuccccacccacgagaaccacgggcugaagacccgccaggagaaguggaugacgggccggaugggggagcgccagcugcagaagaucgagcggugguucgugcgcaacccguucuucgccgucaccgcccucaccaucgccuaccuggugggcagcaacaugacccagcggguggucaucgcgcugcucgugcuggccgugggccccgccuacuccgcccacugcaucgggaucacggaccgcgacuucaucgagggcguccacgggggcaccugggugagcgcgacccuggagcaggacaagugcgugaccgucauggcccccgacaagcccucccucgacaucagccuggagacgguggccaucgaccggccggccgaggugcgcaaggucugcuacaacgccgugcugacccacgugaagaucaacgacaagugccccuccaccggcgaggcgcaccucgccgaggagaacgagggggacaacgccugcaagcggaccuacagcgaccggggcugggggaacggcugcgggcuguucggcaagggcuccaucgucgccugcgccaaguucacgugcgcgaaguccaugagccuguucgagguggaccagaccaagauccaguacgucauccgcgcccagcuccacgugggggccaagcaggagaacuggaacaccgacaucaagacccugaaguucgacgcccugagcggcagccaggagguggaguucaucggguacggcaaggccacgcucgagugccagguccagaccgcgguggacuucgggaacuccuacaucgccgagauggagaccgagagcuggaucguggaccggcagugggcccaggaccugacccugcccuggcaguccggcagcggcggggucuggcgcgagaugcaccaccucguggaguucgagcccccgcacgccgccacgauccgggugcuggcgcugggcaaccaggaggggucccucaagaccgcccugaccggcgccaugcgcgucaccaaggacacgaacgacaacaaccuguacaagcuccacgggggccacgugagcugccgggugaagcuguccgcccugacccucaagggcaccagcuacaagaucugcaccgacaagauguucuucgucaagaaccccacggacaccgggcacggcaccguggugaugcaggucaagguguccaagggggcgcccugccgcaucccggugaucgucgccgacgaccugaccgccgccaucaacaagggcauccuggugaccgugaacccgaucgccagcacgaacgacgacgagguccucaucgaggugaacccgcccuucggcgacuccuacaucaucguggggcggggcgacagccgccugaccuaccaguggcacaaggagggguccagcaucggaagcacgcugggcaaggccuuuucaacaacuuugaagggagcucaaagacuggcagcguugggcgacacagccugggacuuuggcucuauuggaggggucuucaacuccauagguagagccguucaccaaguguuuggaggugccuucagaacacucuuugggggaaugucuuggaucacacaagggcuaaugggugcccuacugcucuggaugggcgucaacgcacgagaccgaucaauugcuuuggccuucuuagccacaggaggugugcucguguucuuagcgaccaaugugcacgccugaggacuaguuauaagacugacuagcccgaugggccucccaacgggcccuccuccccuccuugcaccgagauuaauagaucuaaaaaaaaaaaaaaaaaaaaaaaaaaaaaaaaaaaaaaaaaaaaaaaaaaaaaaaaaaaaaaaaugcaucaaaggcucuuuucagagccaccagaauu

SEQ ID NO: 2188 - RNA, 2242 nt, Artificial Sequence
  mRNA product Design i-3 (A64-N5-hSL-N5) comprising derived and/or modified sequence from YFV__NC_002031.1__SSjev(V3)-prMEdelstem_TM-JEV (polyprotein: aa122-681) (opt1)
aggagaaagcuuaccaugaacgagggcagcaucauguggcuggccucccucgccguggucaucgcgugcgccggggccgugacgcuggugcggaagaaccgcuggcuccugcugaacgucaccuccgaggaccucggcaagaccuucagcguggggaccggcaacugcacgaccaacauccuggaggccaaguacuggugccccgacuccauggaguacaacugccccaaccugagcccccgggaggagcccgacgacaucgacugcuggugcuacggcguggagaacguccgcguggccuacgggaagugcgacuccgcgggccggagccgccggucccgccgggccaucgaccuccccacccacgagaaccacgggcugaagacccgccaggagaaguggaugacgggccggaugggggagcgccagcugcagaagaucgagcggugguucgugcgcaacccguucuucgccgucaccgcccucaccaucgccuaccuggugggcagcaacaugacccagcggguggucaucgcgcugcucgugcuggccgugggccccgccuacuccgcccacugcaucgggaucacggaccgcgacuucaucgagggcguccacgggggcaccugggugagcgcgacccuggagcaggacaagugcgugaccgucauggcccccgacaagcccucccucgacaucagccuggagacgguggccaucgaccggccggccgaggugcgcaaggucugcuacaacgccgugcugacccacgugaagaucaacgacaagugccccuccaccggcgaggcgcaccucgccgaggagaacgagggggacaacgccugcaagcggaccuacagcgaccggggcugggggaacggcugcgggcuguucggcaagggcuccaucgucgccugcgccaaguucacgugcgcgaaguccaugagccuguucgagguggaccagaccaagauccaguacgucauccgcgcccagcuccacgugggggccaagcaggagaacuggaacaccgacaucaagacccugaaguucgacgcccugagcggcagccaggagguggaguucaucggguacggcaaggccacgcucgagugccagguccagaccgcgguggacuucgggaacuccuacaucgccgagauggagaccgagagcuggaucguggaccggcagugggcccaggaccugacccugcccuggcaguccggcagcggcggggucuggcgcgagaugcaccaccucguggaguucgagcccccgcacgccgccacgauccgggugcuggcgcugggcaaccaggaggggucccucaagaccgcccugaccggcgccaugcgcgucaccaaggacacgaacgacaacaaccuguacaagcuccacgggggccacgugagcugccgggugaagcuguccgcccugacccucaagggcaccagcuacaagaucugcaccgacaagauguucuucgucaagaaccccacggacaccgggcacggcaccguggugaugcaggucaagguguccaagggggcgcccugccgcaucccggugaucgucgccgacgaccugaccgccgccaucaacaagggcauccuggugaccgugaacccgaucgccagcacgaacgacgacgagguccucaucgaggugaacccgcccuucggcgacuccuacaucaucguggggcggggcgacagccgccugaccuaccaguggcacaaggagggguccagcaucggcagcacccuggggaaggccuucuccaccacgcucaagggcgcccagcgccuggcggcccugggggacaccgccugggacuucggcagcaucgggggcguguucaacuccaucggccgggccguccaccagguguucgggggcgccuuccgcacccucuucgggggcaugagcuggaucacccaggggcugaugggcgcgcugcuccuguggaugggggugaacgcccgggaccgcuccaucgcccuggccuuccucgcgacgggcggcguccugguguuccuggccaccaacgugcacgccugaggacuaguuauaagacugacuagcccgaugggccucccaacgggcccuccuccccuccuugcaccgagauuaauagaucuaaaaaaaaaaaaaaaaaaaaaaaaaaaaaaaaaaaaaaaaaaaaaaaaaaaaaaaaaaaaaaaaugcaucaaaggcucuuuucagagccaccagaauu

SEQ ID NO: 2189 - RNA, 2366 nt, Artificial Sequence
  mRNA product Design a-1 (hSL-A100) comprising derived and/or modified sequence from YFV__NC_002031.1__X-SS-prME-XX (polyprotein: aa92-788) (opt1)
aggagagucccgcagucggcguccagcggcucugcuuguucgugugugugucguugcaggccuuauucaagcuuaccaugcggggccugagcucccgcaagcggcgcagccacgacgugcucaccguccaguuccugauccuggggaugcuccugaugaccggcggggugacgcuggugcggaagaaccgcuggcuccugcugaacgucaccuccgaggaccucggcaagaccuucagcguggggaccggcaacugcacgaccaacauccuggaggccaaguacuggugccccgacuccauggaguacaacugcccgaaccugagcccccgggaggagcccgacgacaucgacugcuggugcuacggcguggagaacguccgcguggccuacgggaagugcgacuccgcgggccggagccgccggucccgccgggccaucgaccuccccacccacgagaaccacgggcugaagacccgccaggagaaguggaugacgggccggaugggggagcgccagcugcagaagaucgagcggugguucgugcgcaacccguucuucgccgucaccgcccucaccaucgccuaccuggugggcagcaacaugacccagcggguggucaucgcgcugcucgugcuggccgugggccccgccuacuccgcccacugcaucgggaucacggaccgcgacuucaucgagggcguccacgggggcaccugggugagcgcgacccuggagcaggacaagugcgugaccgucauggcccccgacaagcccucccucgacaucagccuggagacgguggccaucgaccggccggccgaggugcgcaaggucugcuacaacgccgugcugacccacgugaagaucaacgacaagugccccuccaccggcgaggcgcaccucgccgaggagaacgagggggacaacgccugcaagcggaccuacagcgaccggggcugggggaacggcugcgggcuguucggcaagggcuccaucgucgccugcgccaaguucacgugcgcgaagagcaugucccuguucgagguggaccagaccaagauccaguacgucauccgcgcccagcuccacgugggggccaagcaggagaacuggaacaccgacaucaagacccugaaguucgacgcccugagcggcagccaggagguggaguucaucggguacggcaaggccacgcucgagugccagguccagaccgcgguggacuucgggaacuccuacaucgccgagauggagaccgagagcuggaucguggaccggcagugggcccaggaccugacccugcccuggcaguccggcagcggcggggucuggcgcgagaugcaccaccucguggaguucgagcccccgcacgccgccacgauccgggugcuggcgcugggcaaccaggaggggucccucaagaccgcccugaccggcgccaugcgcgucaccaaggacacgaacgacaacaaccuguacaagcuccacgggggccacgugagcugccgggugaagcuguccgcccugacccucaagggcaccagcuacaagaucugcaccgacaagauguucuucgucaagaaccccacggacaccgggcacggcaccguggugaugcaggucaagguguccaagggggcgcccugccgcaucccggugaucgucgccgacgaccugaccgccgccaucaacaagggcauccuggugaccgugaacccgaucgccagcacgaacgacgacgagguccucaucgaggugaacccccccuucggcgacuccuacaucaucguggggcggggcgacagccgccugaccuaccaguggcacaaggagggguccagcaucggcaagcuguucacccagaccaugaagggggucgagcggcuggcggugaugggcgacacggccugggacuucuccagcgccggcggguucuucaccuccgugggcaaggggauccacaccgucuucggcagcgccuuccaggggcucuucggcggccugaacuggaucaccaaggugaucaugggggccgugcugaucugggucggcaucaacacgcgcaacaugaccauguccaugagcaugauccucgugggggugaucaugauguuccugagccugggcgucggggcggaccagggcugcgccaucaacuucggcaagugaggacuagucccuguucccagagcccacuuuuuuuucuuuuuuugaaauaaaauagccugucuuucagaucucaaaggcucuuuucagagccaccaaaaaaaaaaaaaaaaaaaaaaaaaaaaaaaaaaaaaaaaaaaaaaaaaaaaaaaaaaaaaaaaaaaaaaaaaaaaaaaaaaaaaaaaaaaaaaaaaaaaa

SEQ ID NO: 2190 - RNA, 2366 nt, Artificial Sequence
  mRNA product Design a-1 (hSL-A100) comprising derived and/or modified sequence from YFV__NC_002031.1__X-SS-prME-XX (polyprotein: aa92-788) (opt1) R8483
aggagagucccgcagucggcguccagcggcucugcuuguucgugugugugucguugcaggccuuauucaagcuuaccaugcggggccugagcucccgcaagcggcgcagccacgacgugcucaccguccaguuccugauccuggggaugcuccugaugaccggcggggugacgcuggugcggaagaaccgcuggcuccugcugaacgucaccuccgaggaccucggcaagaccuucagcguggggaccggcaacugcacgaccaacauccuggaggccaaguacuggugccccgacuccauggaguacaacugcccgaaccugagcccccgggaggagcccgacgacaucgacugcuggugcuacggcguggagaacguccgcguggccuacgggaagugcgacuccgcgggccggagccgccggucccgccgggccaucgaccuccccacccacgagaaccacgggcugaagacccgccaggagaaguggaugacgggccggaugggggagcgccagcugcagaagaucgagcggugguucgugcgcaacccguucuucgccgucaccgcccucaccaucgccuaccuggugggcagcaacaugacccagcggguggucaucgcgcugcucgugcuggccgugggccccgccuacuccgcccacugcaucgggaucacggaccgcgacuucaucgagggcguccacgggggcaccugggugagcgcgacccuggagcaggacaagugcgugaccgucauggcccccgacaagcccucccucgacaucagccuggagacgguggccaucgaccggccggccgaggugcgcaaggucugcuacaacgccgugcugacccacgugaagaucaacgacaagugccccuccaccggcgaggcgcaccucgccgaggagaacgagggggacaacgccugcaagcggaccuacagcgaccggggcugggggaacggcugcgggcuguucggcaagggcuccaucgucgccugcgccaaguucacgugcgcgaaguccaugagccuguucgagguggaccagaccaagauccaguacgucauccgcgcccagcuccacgugggggccaagcaggagaacuggaacaccgacaucaagacccugaaguucgacgcccugagcggcagccaggagguggaguucaucggguacggcaaggccacgcucgagugccagguccagaccgcgguggacuucgggaacuccuacaucgccgagauggagaccgagagcuggaucguggaccggcagugggcccaggaccugacccugcccuggcaguccggcagcggcggggucuggcgcgagaugcaccaccucguggaguucgagcccccgcacgccgccacgauccgggugcuggcgcugggcaaccaggaggggucccucaagaccgcccugaccggcgccaugcgcgucaccaaggacacgaacgacaacaaccuguacaagcuccacgggggccacgugagcugccgggugaagcuguccgcccugacccucaagggcaccagcuacaagaucugcaccgacaagauguucuucgucaagaaccccacggacaccgggcacggcaccguggugaugcaggucaagguguccaagggggcgcccugccgcaucccggugaucgucgccgacgaccugaccgccgccaucaacaagggcauccuggugaccgugaacccgaucgccagcacgaacgacgacgagguccucaucgaggugaacccccccuucggcgacuccuacaucaucguggggcggggcgacagccgccugaccuaccaguggcacaaggagggguccagcaucggcaagcuguucacccagaccaugaagggggucgagcggcuggcggugaugggcgacacggccugggacuucuccagcgccggcggguucuucaccuccgugggcaaggggauccacaccgucuucggcagcgccuuccaggggcuguucggcggccucaacuggaucaccaaggugaucaugggggccgugcugaucugggucggcaucaacacgcgcaacaugaccauguccaugagcaugauccucgugggggugaucaugauguuccugagccugggcgucggggcggaccagggcugcgccaucaacuucggcaagugaggacuagucccuguucccagagcccacuuuuuuuucuuuuuuugaaauaaaauagccugucuuucagaucucaaaggcucuuuucagagccaccaaaaaaaaaaaaaaaaaaaaaaaaaaaaaaaaaaaaaaaaaaaaaaaaaaaaaaaaaaaaaaaaaaaaaaaaaaaaaaaaaaaaaaaaaaaaaaaaaaaaa

SEQ ID NO: 2191 - RNA, 2336 nt, Artificial Sequence
  mRNA product Design a-1 (hSL-A100) comprising derived and/or modified sequence from YFV__NC_002031.1__X-SS-prME (polyprotein: aa92-778) (opt1) R8493
aggagagucccgcagucggcguccagcggcucugcuuguucgugugugugucguugcaggccuuauucaagcuuaccaugcggggccugagcucccgcaagcggcgcagccacgacgugcucaccguccaguuccugauccuggggaugcuccugaugaccggcggggugacgcuggugcggaagaaccgcuggcuccugcugaacgucaccuccgaggaccucggcaagaccuucagcguggggaccggcaacugcacgaccaacauccuggaggccaaguacuggugccccgacuccauggaguacaacugccccaaccugagcccccgggaggagcccgacgacaucgacugcuggugcuacggcguggagaacguccgcguggccuacgggaagugcgacuccgcgggccggagccgccggucccgccgggccaucgaccuccccacccacgagaaccacgggcugaagacccgccaggagaaguggaugacgggccggaugggggagcgccagcugcagaagaucgagcggugguucgugcgcaacccguucuucgccgucaccgcccucaccaucgccuaccuggugggcagcaacaugacccagcggguggucaucgcgcugcucgugcuggccgugggccccgccuacuccgcccacugcaucgggaucacggaccgcgacuucaucgagggcguccacgggggcaccugggugagcgcgacccuggagcaggacaagugcgugaccgucauggcccccgacaagcccucccucgacaucagccuggagacgguggccaucgaccggccggccgaggugcgcaaggucugcuacaacgccgugcugacccacgugaagaucaacgacaagugccccuccaccggcgaggcgcaccucgccgaggagaacgagggggacaacgccugcaagcggaccuacagcgaccggggcugggggaacggcugcgggcuguucggcaagggcuccaucgucgccugcgccaaguucacgugcgcgaaguccaugagccuguucgagguggaccagaccaagauccaguacgucauccgcgcccagcuccacgugggggccaagcaggagaacuggaacaccgacaucaagacccugaaguucgacgcccugagcggcagccaggagguggaguucaucggguacggcaaggccacgcucgagugccagguccagaccgcgguggacuucgggaacuccuacaucgccgagauggagaccgagagcuggaucguggaccggcagugggcccaggaccugacccugcccuggcaguccggcagcggcggggucuggcgcgagaugcaccaccucguggaguucgagcccccgcacgccgccacgauccgggugcuggcgcugggcaaccaggaggggucccucaagaccgcccugaccggcgccaugcgcgucaccaaggacacgaacgacaacaaccuguacaagcuccacgggggccacgugagcugccgggugaagcuguccgcccugacccucaagggcaccagcuacaagaucugcaccgacaagauguucuucgucaagaaccccacggacaccgggcacggcaccguggugaugcaggucaagguguccaagggggcgcccugccgcaucccggugaucgucgccgacgaccugaccgccgccaucaacaagggcauccuggugaccgugaacccgaucgccagcacgaacgacgacgagguccucaucgaggugaacccgcccuucggcgacuccuacaucaucguggggcggggcgacagccgccugaccuaccaguggcacaaggagggguccagcaucggcaagcuguucacccagaccaugaagggggucgagcggcuggcggugaugggcgacacggccugggacuucuccagcgccggcggguucuucaccuccgugggcaaggggauccacaccgucuucggcagcgccuuccaggggcuguucggcggccucaacuggaucaccaaggugaucaugggggccgugcugaucugggucggcaucaacacgcgcaacaugaccauguccaugagcaugauccucgugggggugaucaugauguuccugagccugggcgucggggcgugaggacuagucccuguucccagagcccacuuuuuuuucuuuuuuugaaauaaaauagccugucuuucagaucucaaaggcucuuuucagagccaccaaaaaaaaaaaaaaaaaaaaaaaaaaaaaaaaaaaaaaaaaaaaaaaaaaaaaaaaaaaaaaaaaaaaaaaaaaaaaaaaaaaaaaaaaaaaaaaaaaaaa

SEQ ID NO: 2192 - RNA, 2339 nt, Artificial Sequence
  mRNA product Design a-1 (hSL-A100) comprising derived and/or modified sequence from YFV__NC_002031.1__SSjev(V3)-prME-XX (polyprotein: aa122-788) (opt1) R8490
aggagagucccgcagucggcguccagcggcucugcuuguucgugugugugucguugcaggccuuauucaagcuuaccaugaacgagggcagcaucauguggcuggccucccucgccguggucaucgcgugcgccggggccgugacgcuggugcggaagaaccgcuggcuccugcugaacgucaccuccgaggaccucggcaagaccuucagcguggggaccggcaacugcacgaccaacauccuggaggccaaguacuggugccccgacuccauggaguacaacugccccaaccugagcccccgggaggagcccgacgacaucgacugcuggugcuacggcguggagaacguccgcguggccuacgggaagugcgacuccgcgggccggagccgccggucccgccgggccaucgaccuccccacccacgagaaccacgggcugaagacccgccaggagaaguggaugacgggccggaugggggagcgccagcugcagaagaucgagcggugguucgugcgcaacccguucuucgccgucaccgcccucaccaucgccuaccuggugggcagcaacaugacccagcggguggucaucgcgcugcucgugcuggccgugggccccgccuacuccgcccacugcaucgggaucacggaccgcgacuucaucgagggcguccacgggggcaccugggugagcgcgacccuggagcaggacaagugcgugaccgucauggcccccgacaagcccucccucgacaucagccuggagacgguggccaucgaccggccggccgaggugcgcaaggucugcuacaacgccgugcugacccacgugaagaucaacgacaagugccccuccaccggcgaggcgcaccucgccgaggagaacgagggggacaacgccugcaagcggaccuacagcgaccggggcugggggaacggcugcgggcuguucggcaagggcuccaucgucgccugcgccaaguucacgugcgcgaaguccaugagccuguucgagguggaccagaccaagauccaguacgucauccgcgcccagcuccacgugggggccaagcaggagaacuggaacaccgacaucaagacccugaaguucgacgcccugagcggcagccaggagguggaguucaucggguacggcaaggccacgcucgagugccagguccagaccgcgguggacuucgggaacuccuacaucgccgagauggagaccgagagcuggaucguggaccggcagugggcccaggaccugacccugcccuggcaguccggcagcggcggggucuggcgcgagaugcaccaccucguggaguucgagcccccgcacgccgccacgauccgggugcuggcgcugggcaaccaggaggggucccucaagaccgcccugaccggcgccaugcgcgucaccaaggacacgaacgacaacaaccuguacaagcuccacgggggccacgugagcugccgggugaagcuguccgcccugacccucaagggcaccagcuacaagaucugcaccgacaagauguucuucgucaagaaccccacggacaccgggcacggcaccguggugaugcaggucaagguguccaagggggcgcccugccgcaucccggugaucgucgccgacgaccugaccgccgccaucaacaagggcauccuggugaccgugaacccgaucgccagcacgaacgacgacgagguccucaucgaggugaacccgcccuucggcgacuccuacaucaucguggggcggggcgacagccgccugaccuaccaguggcacaaggagggguccagcaucggcaagcuguucacccagaccaugaagggggucgagcggcuggcggugaugggcgacacggccugggacuucuccagcgccggcggguucuucaccuccgugggcaaggggauccacaccgucuucggcagcgccuuccaggggcuguucggcggccucaacuggaucaccaaggugaucaugggggccgugcugaucugggucggcaucaacacgcgcaacaugaccauguccaugagcaugauccucgugggggugaucaugauguuccugagccugggcgucggggcggaccagggcugcgccaucaacuucggcaagugaggacuagucccuguucccagagcccacuuuuuuuucuuuuuuugaaauaaaauagccugucuuucagaucucaaaggcucuuuucagagccaccaaaaaaaaaaaaaaaaaaaaaaaaaaaaaaaaaaaaaaaaaaaaaaaaaaaaaaaaaaaaaaaaaaaaaaaaaaaaaaaaaaaaaaaaaaaaaaaaaaaaa

SEQ ID NO: 2193 - RNA, 2348 nt, Artificial Sequence
  mRNA product Design a-1 (hSL-A100) comprising derived and/or modified sequence from YFV__NC_002031.1__X-SS-prMEdelstem_TM-JEV (polyprotein: aa92-681) (opt1) R8496
aggagagucccgcagucggcguccagcggcucugcuuguucgugugugugucguugcaggccuuauucaagcuuaccaugcggggccugagcucccgcaagcggcgcagccacgacgugcucaccguccaguuccugauccuggggaugcuccugaugaccggcggggugacgcuggugcggaagaaccgcuggcuccugcugaacgucaccuccgaggaccucggcaagaccuucagcguggggaccggcaacugcacgaccaacauccuggaggccaaguacuggugccccgacuccauggaguacaacugccccaaccugagcccccgggaggagcccgacgacaucgacugcuggugcuacggcguggagaacguccgcguggccuacgggaagugcgacuccgcgggccggagccgccggucccgccgggccaucgaccuccccacccacgagaaccacgggcugaagacccgccaggagaaguggaugacgggccggaugggggagcgccagcugcagaagaucgagcggugguucgugcgcaacccguucuucgccgucaccgcccucaccaucgccuaccuggugggcagcaacaugacccagcggguggucaucgcgcugcucgugcuggccgugggccccgccuacuccgcccacugcaucgggaucacggaccgcgacuucaucgagggcguccacgggggcaccugggugagcgcgacccuggagcaggacaagugcgugaccgucauggcccccgacaagcccucccucgacaucagccuggagacgguggccaucgaccggccggccgaggugcgcaaggucugcuacaacgccgugcugacccacgugaagaucaacgacaagugccccuccaccggcgaggcgcaccucgccgaggagaacgagggggacaacgccugcaagcggaccuacagcgaccggggcugggggaacggcugcgggcuguucggcaagggcuccaucgucgccugcgccaaguucacgugcgcgaaguccaugagccuguucgagguggaccagaccaagauccaguacgucauccgcgcccagcuccacgugggggccaagcaggagaacuggaacaccgacaucaagacccugaaguucgacgcccugagcggcagccaggagguggaguucaucggguacggcaaggccacgcucgagugccagguccagaccgcgguggacuucgggaacuccuacaucgccgagauggagaccgagagcuggaucguggaccggcagugggcccaggaccugacccugcccuggcaguccggcagcggcggggucuggcgcgagaugcaccaccucguggaguucgagcccccgcacgccgccacgauccgggugcuggcgcugggcaaccaggaggggucccucaagaccgcccugaccggcgccaugcgcgucaccaaggacacgaacgacaacaaccuguacaagcuccacgggggccacgugagcugccgggugaagcuguccgcccugacccucaagggcaccagcuacaagaucugcaccgacaagauguucuucgucaagaaccccacggacaccgggcacggcaccguggugaugcaggucaagguguccaagggggcgcccugccgcaucccggugaucgucgccgacgaccugaccgccgccaucaacaagggcauccuggugaccgugaacccgaucgccagcacgaacgacgacgagguccucaucgaggugaacccgcccuucggcgacuccuacaucaucguggggcggggcgacagccgccugaccuaccaguggcacaaggagggguccagcaucggaagcacgcugggcaaggccuuuucaacaacuuugaagggagcucaaagacuggcagcguugggcgacacagccugggacuuuggcucuauuggaggggucuucaacuccauagguagagccguucaccaaguguuuggaggugccuucagaacacucuuugggggaaugucuuggaucacacaagggcuaaugggugcccuacugcucuggaugggcgucaacgcacgagaccgaucaauugcuuuggccuucuuagccacaggaggugugcucguguucuuagcgaccaaugugcacgccugaggacuagucccuguucccagagcccacuuuuuuuucuuuuuuugaaauaaaauagccugucuuucagaucucaaaggcucuuuucagagccaccaaaaaaaaaaaaaaaaaaaaaaaaaaaaaaaaaaaaaaaaaaaaaaaaaaaaaaaaaaaaaaaaaaaaaaaaaaaaaaaaaaaaaaaaaaaaaaaaaaaaa

SEQ ID NO: 2194 - RNA, 2321 nt, Artificial Sequence
  mRNA product Design a-1 (hSL-A100) comprising derived and/or modified sequence from YFV__NC_002031.1__SSjev(V3)-prMEdelstem_TM-JEV (polyprotein: aa122-681) (opt1) R8499
aggagagucccgcagucggcguccagcggcucugcuuguucgugugugugucguugcaggccuuauucaagcuuaccaugaacgagggcagcaucauguggcuggccucccucgccguggucaucgcgugcgccggggccgugacgcuggugcggaagaaccgcuggcuccugcugaacgucaccuccgaggaccucggcaagaccuucagcguggggaccggcaacugcacgaccaacauccuggaggccaaguacuggugccccgacuccauggaguacaacugccccaaccugagcccccgggaggagcccgacgacaucgacugcuggugcuacggcguggagaacguccgcguggccuacgggaagugcgacuccgcgggccggagccgccggucccgccgggccaucgaccuccccacccacgagaaccacgggcugaagacccgccaggagaaguggaugacgggccggaugggggagcgccagcugcagaagaucgagcggugguucgugcgcaacccguucuucgccgucaccgcccucaccaucgccuaccuggugggcagcaacaugacccagcggguggucaucgcgcugcucgugcuggccgugggccccgccuacuccgcccacugcaucgggaucacggaccgcgacuucaucgagggcguccacgggggcaccugggugagcgcgacccuggagcaggacaagugcgugaccgucauggcccccgacaagcccucccucgacaucagccuggagacgguggccaucgaccggccggccgaggugcgcaaggucugcuacaacgccgugcugacccacgugaagaucaacgacaagugccccuccaccggcgaggcgcaccucgccgaggagaacgagggggacaacgccugcaagcggaccuacagcgaccggggcugggggaacggcugcgggcuguucggcaagggcuccaucgucgccugcgccaaguucacgugcgcgaaguccaugagccuguucgagguggaccagaccaagauccaguacgucauccgcgcccagcuccacgugggggccaagcaggagaacuggaacaccgacaucaagacccugaaguucgacgcccugagcggcagccaggagguggaguucaucggguacggcaaggccacgcucgagugccagguccagaccgcgguggacuucgggaacuccuacaucgccgagauggagaccgagagcuggaucguggaccggcagugggcccaggaccugacccugcccuggcaguccggcagcggcggggucuggcgcgagaugcaccaccucguggaguucgagcccccgcacgccgccacgauccgggugcuggcgcugggcaaccaggaggggucccucaagaccgcccugaccggcgccaugcgcgucaccaaggacacgaacgacaacaaccuguacaagcuccacgggggccacgugagcugccgggugaagcuguccgcccugacccucaagggcaccagcuacaagaucugcaccgacaagauguucuucgucaagaaccccacggacaccgggcacggcaccguggugaugcaggucaagguguccaagggggcgcccugccgcaucccggugaucgucgccgacgaccugaccgccgccaucaacaagggcauccuggugaccgugaacccgaucgccagcacgaacgacgacgagguccucaucgaggugaacccgcccuucggcgacuccuacaucaucguggggcggggcgacagccgccugaccuaccaguggcacaaggagggguccagcaucggcagcacccuggggaaggccuucuccaccacgcucaagggcgcccagcgccuggcggcccugggggacaccgccugggacuucggcagcaucgggggcguguucaacuccaucggccgggccguccaccagguguucgggggcgccuuccgcacccucuucgggggcaugagcuggaucacccaggggcugaugggcgcgcugcuccuguggaugggggugaacgcccgggaccgcuccaucgcccuggccuuccucgcgacgggcggcguccugguguuccuggccaccaacgugcacgccugaggacuagucccuguucccagagcccacuuuuuuuucuuuuuuugaaauaaaauagccugucuuucagaucucaaaggcucuuuucagagccaccaaaaaaaaaaaaaaaaaaaaaaaaaaaaaaaaaaaaaaaaaaaaaaaaaaaaaaaaaaaaaaaaaaaaaaaaaaaaaaaaaaaaaaaaaaaaaaaaaaaaa

SEQ ID NO: 2195 - RNA, 2307 nt, Artificial Sequence
  mRNA product Design i-3 (hSL-A100) comprising derived and/or modified sequence from YFV__NC_002031.1__X-SS-prME-XX (polyprotein: aa92-788) (opt1)
aggagaaagcuuaccaugcggggccugagcucccgcaagcggcgcagccacgacgugcucaccguccaguuccugauccuggggaugcuccugaugaccggcggggugacgcuggugcggaagaaccgcuggcuccugcugaacgucaccuccgaggaccucggcaagaccuucagcguggggaccggcaacugcacgaccaacauccuggaggccaaguacuggugccccgacuccauggaguacaacugcccgaaccugagcccccgggaggagcccgacgacaucgacugcuggugcuacggcguggagaacguccgcguggccuacgggaagugcgacuccgcgggccggagccgccggucccgccgggccaucgaccuccccacccacgagaaccacgggcugaagacccgccaggagaaguggaugacgggccggaugggggagcgccagcugcagaagaucgagcggugguucgugcgcaacccguucuucgccgucaccgcccucaccaucgccuaccuggugggcagcaacaugacccagcggguggucaucgcgcugcucgugcuggccgugggccccgccuacuccgcccacugcaucgggaucacggaccgcgacuucaucgagggcguccacgggggcaccugggugagcgcgacccuggagcaggacaagugcgugaccgucauggcccccgacaagcccucccucgacaucagccuggagacgguggccaucgaccggccggccgaggugcgcaaggucugcuacaacgccgugcugacccacgugaagaucaacgacaagugccccuccaccggcgaggcgcaccucgccgaggagaacgagggggacaacgccugcaagcggaccuacagcgaccggggcugggggaacggcugcgggcuguucggcaagggcuccaucgucgccugcgccaaguucacgugcgcgaagagcaugucccuguucgagguggaccagaccaagauccaguacgucauccgcgcccagcuccacgugggggccaagcaggagaacuggaacaccgacaucaagacccugaaguucgacgcccugagcggcagccaggagguggaguucaucggguacggcaaggccacgcucgagugccagguccagaccgcgguggacuucgggaacuccuacaucgccgagauggagaccgagagcuggaucguggaccggcagugggcccaggaccugacccugcccuggcaguccggcagcggcggggucuggcgcgagaugcaccaccucguggaguucgagcccccgcacgccgccacgauccgggugcuggcgcugggcaaccaggaggggucccucaagaccgcccugaccggcgccaugcgcgucaccaaggacacgaacgacaacaaccuguacaagcuccacgggggccacgugagcugccgggugaagcuguccgcccugacccucaagggcaccagcuacaagaucugcaccgacaagauguucuucgucaagaaccccacggacaccgggcacggcaccguggugaugcaggucaagguguccaagggggcgcccugccgcaucccggugaucgucgccgacgaccugaccgccgccaucaacaagggcauccuggugaccgugaacccgaucgccagcacgaacgacgacgagguccucaucgaggugaacccccccuucggcgacuccuacaucaucguggggcggggcgacagccgccugaccuaccaguggcacaaggagggguccagcaucggcaagcuguucacccagaccaugaagggggucgagcggcuggcggugaugggcgacacggccugggacuucuccagcgccggcggguucuucaccuccgugggcaaggggauccacaccgucuucggcagcgccuuccaggggcucuucggcggccugaacuggaucaccaaggugaucaugggggccgugcugaucugggucggcaucaacacgcgcaacaugaccauguccaugagcaugauccucgugggggugaucaugauguuccugagccugggcgucggggcggaccagggcugcgccaucaacuucggcaagugaggacuaguuauaagacugacuagcccgaugggccucccaacgggcccuccuccccuccuugcaccgagauuaaucaaaggcucuuuucagagccaccaaaaaaaaaaaaaaaaaaaaaaaaaaaaaaaaaaaaaaaaaaaaaaaaaaaaaaaaaaaaaaaaaaaaaaaaaaaaaaaaaaaaaaaaaaaaaaaaaaaaa

SEQ ID NO: 2196 - RNA, 2307 nt, Artificial Sequence
  mRNA product Design i-3 (hSL-A100) comprising derived and/or modified sequence from YFV__NC_002031.1__X-SS-prME-XX (polyprotein: aa92-788) (opt1)
aggagaaagcuuaccaugcggggccugagcucccgcaagcggcgcagccacgacgugcucaccguccaguuccugauccuggggaugcuccugaugaccggcggggugacgcuggugcggaagaaccgcuggcuccugcugaacgucaccuccgaggaccucggcaagaccuucagcguggggaccggcaacugcacgaccaacauccuggaggccaaguacuggugccccgacuccauggaguacaacugcccgaaccugagcccccgggaggagcccgacgacaucgacugcuggugcuacggcguggagaacguccgcguggccuacgggaagugcgacuccgcgggccggagccgccggucccgccgggccaucgaccuccccacccacgagaaccacgggcugaagacccgccaggagaaguggaugacgggccggaugggggagcgccagcugcagaagaucgagcggugguucgugcgcaacccguucuucgccgucaccgcccucaccaucgccuaccuggugggcagcaacaugacccagcggguggucaucgcgcugcucgugcuggccgugggccccgccuacuccgcccacugcaucgggaucacggaccgcgacuucaucgagggcguccacgggggcaccugggugagcgcgacccuggagcaggacaagugcgugaccgucauggcccccgacaagcccucccucgacaucagccuggagacgguggccaucgaccggccggccgaggugcgcaaggucugcuacaacgccgugcugacccacgugaagaucaacgacaagugccccuccaccggcgaggcgcaccucgccgaggagaacgagggggacaacgccugcaagcggaccuacagcgaccggggcugggggaacggcugcgggcuguucggcaagggcuccaucgucgccugcgccaaguucacgugcgcgaaguccaugagccuguucgagguggaccagaccaagauccaguacgucauccgcgcccagcuccacgugggggccaagcaggagaacuggaacaccgacaucaagacccugaaguucgacgcccugagcggcagccaggagguggaguucaucggguacggcaaggccacgcucgagugccagguccagaccgcgguggacuucgggaacuccuacaucgccgagauggagaccgagagcuggaucguggaccggcagugggcccaggaccugacccugcccuggcaguccggcagcggcggggucuggcgcgagaugcaccaccucguggaguucgagcccccgcacgccgccacgauccgggugcuggcgcugggcaaccaggaggggucccucaagaccgcccugaccggcgccaugcgcgucaccaaggacacgaacgacaacaaccuguacaagcuccacgggggccacgugagcugccgggugaagcuguccgcccugacccucaagggcaccagcuacaagaucugcaccgacaagauguucuucgucaagaaccccacggacaccgggcacggcaccguggugaugcaggucaagguguccaagggggcgcccugccgcaucccggugaucgucgccgacgaccugaccgccgccaucaacaagggcauccuggugaccgugaacccgaucgccagcacgaacgacgacgagguccucaucgaggugaacccccccuucggcgacuccuacaucaucguggggcggggcgacagccgccugaccuaccaguggcacaaggagggguccagcaucggcaagcuguucacccagaccaugaagggggucgagcggcuggcggugaugggcgacacggccugggacuucuccagcgccggcggguucuucaccuccgugggcaaggggauccacaccgucuucggcagcgccuuccaggggcuguucggcggccucaacuggaucaccaaggugaucaugggggccgugcugaucugggucggcaucaacacgcgcaacaugaccauguccaugagcaugauccucgugggggugaucaugauguuccugagccugggcgucggggcggaccagggcugcgccaucaacuucggcaagugaggacuaguuauaagacugacuagcccgaugggccucccaacgggcccuccuccccuccuugcaccgagauuaaucaaaggcucuuuucagagccaccaaaaaaaaaaaaaaaaaaaaaaaaaaaaaaaaaaaaaaaaaaaaaaaaaaaaaaaaaaaaaaaaaaaaaaaaaaaaaaaaaaaaaaaaaaaaaaaaaaaaa

SEQ ID NO: 2197 - RNA, 2277 nt, Artificial Sequence
  mRNA product Design i-3 (hSL-A100) comprising derived and/or modified sequence from YFV__NC_002031.1__X-SS-prME (polyprotein: aa92-778) (opt1)
aggagaaagcuuaccaugcggggccugagcucccgcaagcggcgcagccacgacgugcucaccguccaguuccugauccuggggaugcuccugaugaccggcggggugacgcuggugcggaagaaccgcuggcuccugcugaacgucaccuccgaggaccucggcaagaccuucagcguggggaccggcaacugcacgaccaacauccuggaggccaaguacuggugccccgacuccauggaguacaacugccccaaccugagcccccgggaggagcccgacgacaucgacugcuggugcuacggcguggagaacguccgcguggccuacgggaagugcgacuccgcgggccggagccgccggucccgccgggccaucgaccuccccacccacgagaaccacgggcugaagacccgccaggagaaguggaugacgggccggaugggggagcgccagcugcagaagaucgagcggugguucgugcgcaacccguucuucgccgucaccgcccucaccaucgccuaccuggugggcagcaacaugacccagcggguggucaucgcgcugcucgugcuggccgugggccccgccuacuccgcccacugcaucgggaucacggaccgcgacuucaucgagggcguccacgggggcaccugggugagcgcgacccuggagcaggacaagugcgugaccgucauggcccccgacaagcccucccucgacaucagccuggagacgguggccaucgaccggccggccgaggugcgcaaggucugcuacaacgccgugcugacccacgugaagaucaacgacaagugccccuccaccggcgaggcgcaccucgccgaggagaacgagggggacaacgccugcaagcggaccuacagcgaccggggcugggggaacggcugcgggcuguucggcaagggcuccaucgucgccugcgccaaguucacgugcgcgaaguccaugagccuguucgagguggaccagaccaagauccaguacgucauccgcgcccagcuccacgugggggccaagcaggagaacuggaacaccgacaucaagacccugaaguucgacgcccugagcggcagccaggagguggaguucaucggguacggcaaggccacgcucgagugccagguccagaccgcgguggacuucgggaacuccuacaucgccgagauggagaccgagagcuggaucguggaccggcagugggcccaggaccugacccugcccuggcaguccggcagcggcggggucuggcgcgagaugcaccaccucguggaguucgagcccccgcacgccgccacgauccgggugcuggcgcugggcaaccaggaggggucccucaagaccgcccugaccggcgccaugcgcgucaccaaggacacgaacgacaacaaccuguacaagcuccacgggggccacgugagcugccgggugaagcuguccgcccugacccucaagggcaccagcuacaagaucugcaccgacaagauguucuucgucaagaaccccacggacaccgggcacggcaccguggugaugcaggucaagguguccaagggggcgcccugccgcaucccggugaucgucgccgacgaccugaccgccgccaucaacaagggcauccuggugaccgugaacccgaucgccagcacgaacgacgacgagguccucaucgaggugaacccgcccuucggcgacuccuacaucaucguggggcggggcgacagccgccugaccuaccaguggcacaaggagggguccagcaucggcaagcuguucacccagaccaugaagggggucgagcggcuggcggugaugggcgacacggccugggacuucuccagcgccggcggguucuucaccuccgugggcaaggggauccacaccgucuucggcagcgccuuccaggggcuguucggcggccucaacuggaucaccaaggugaucaugggggccgugcugaucugggucggcaucaacacgcgcaacaugaccauguccaugagcaugauccucgugggggugaucaugauguuccugagccugggcgucggggcgugaggacuaguuauaagacugacuagcccgaugggccucccaacgggcccuccuccccuccuugcaccgagauuaaucaaaggcucuuuucagagccaccaaaaaaaaaaaaaaaaaaaaaaaaaaaaaaaaaaaaaaaaaaaaaaaaaaaaaaaaaaaaaaaaaaaaaaaaaaaaaaaaaaaaaaaaaaaaaaaaaaaaa

SEQ ID NO: 2198 - RNA, 2280 nt, Artificial Sequence
  mRNA product Design i-3 (hSL-A100) comprising derived and/or modified sequence from YFV__NC_002031.1__SSjev(V3)-prME-XX (polyprotein: aa122-788) (opt1)
aggagaaagcuuaccaugaacgagggcagcaucauguggcuggccucccucgccguggucaucgcgugcgccggggccgugacgcuggugcggaagaaccgcuggcuccugcugaacgucaccuccgaggaccucggcaagaccuucagcguggggaccggcaacugcacgaccaacauccuggaggccaaguacuggugccccgacuccauggaguacaacugccccaaccugagcccccgggaggagcccgacgacaucgacugcuggugcuacggcguggagaacguccgcguggccuacgggaagugcgacuccgcgggccggagccgccggucccgccgggccaucgaccuccccacccacgagaaccacgggcugaagacccgccaggagaaguggaugacgggccggaugggggagcgccagcugcagaagaucgagcggugguucgugcgcaacccguucuucgccgucaccgcccucaccaucgccuaccuggugggcagcaacaugacccagcggguggucaucgcgcugcucgugcuggccgugggccccgccuacuccgcccacugcaucgggaucacggaccgcgacuucaucgagggcguccacgggggcaccugggugagcgcgacccuggagcaggacaagugcgugaccgucauggcccccgacaagcccucccucgacaucagccuggagacgguggccaucgaccggccggccgaggugcgcaaggucugcuacaacgccgugcugacccacgugaagaucaacgacaagugccccuccaccggcgaggcgcaccucgccgaggagaacgagggggacaacgccugcaagcggaccuacagcgaccggggcugggggaacggcugcgggcuguucggcaagggcuccaucgucgccugcgccaaguucacgugcgcgaaguccaugagccuguucgagguggaccagaccaagauccaguacgucauccgcgcccagcuccacgugggggccaagcaggagaacuggaacaccgacaucaagacccugaaguucgacgcccugagcggcagccaggagguggaguucaucggguacggcaaggccacgcucgagugccagguccagaccgcgguggacuucgggaacuccuacaucgccgagauggagaccgagagcuggaucguggaccggcagugggcccaggaccugacccugcccuggcaguccggcagcggcggggucuggcgcgagaugcaccaccucguggaguucgagcccccgcacgccgccacgauccgggugcuggcgcugggcaaccaggaggggucccucaagaccgcccugaccggcgccaugcgcgucaccaaggacacgaacgacaacaaccuguacaagcuccacgggggccacgugagcugccgggugaagcuguccgcccugacccucaagggcaccagcuacaagaucugcaccgacaagauguucuucgucaagaaccccacggacaccgggcacggcaccguggugaugcaggucaagguguccaagggggcgcccugccgcaucccggugaucgucgccgacgaccugaccgccgccaucaacaagggcauccuggugaccgugaacccgaucgccagcacgaacgacgacgagguccucaucgaggugaacccgcccuucggcgacuccuacaucaucguggggcggggcgacagccgccugaccuaccaguggcacaaggagggguccagcaucggcaagcuguucacccagaccaugaagggggucgagcggcuggcggugaugggcgacacggccugggacuucuccagcgccggcggguucuucaccuccgugggcaaggggauccacaccgucuucggcagcgccuuccaggggcuguucggcggccucaacuggaucaccaaggugaucaugggggccgugcugaucugggucggcaucaacacgcgcaacaugaccauguccaugagcaugauccucgugggggugaucaugauguuccugagccugggcgucggggcggaccagggcugcgccaucaacuucggcaagugaggacuaguuauaagacugacuagcccgaugggccucccaacgggcccuccuccccuccuugcaccgagauuaaucaaaggcucuuuucagagccaccaaaaaaaaaaaaaaaaaaaaaaaaaaaaaaaaaaaaaaaaaaaaaaaaaaaaaaaaaaaaaaaaaaaaaaaaaaaaaaaaaaaaaaaaaaaaaaaaaaaaa

SEQ ID NO: 2199 - RNA, 2289 nt, Artificial Sequence
  mRNA product Design i-3 (hSL-A100) comprising derived and/or modified sequence from YFV__NC_002031.1__X-SS-prMEdelstem_TM-JEV (polyprotein: aa92-681) (opt1)
aggagaaagcuuaccaugcggggccugagcucccgcaagcggcgcagccacgacgugcucaccguccaguuccugauccuggggaugcuccugaugaccggcggggugacgcuggugcggaagaaccgcuggcuccugcugaacgucaccuccgaggaccucggcaagaccuucagcguggggaccggcaacugcacgaccaacauccuggaggccaaguacuggugccccgacuccauggaguacaacugccccaaccugagcccccgggaggagcccgacgacaucgacugcuggugcuacggcguggagaacguccgcguggccuacgggaagugcgacuccgcgggccggagccgccggucccgccgggccaucgaccuccccacccacgagaaccacgggcugaagacccgccaggagaaguggaugacgggccggaugggggagcgccagcugcagaagaucgagcggugguucgugcgcaacccguucuucgccgucaccgcccucaccaucgccuaccuggugggcagcaacaugacccagcggguggucaucgcgcugcucgugcuggccgugggccccgccuacuccgcccacugcaucgggaucacggaccgcgacuucaucgagggcguccacgggggcaccugggugagcgcgacccuggagcaggacaagugcgugaccgucauggcccccgacaagcccucccucgacaucagccuggagacgguggccaucgaccggccggccgaggugcgcaaggucugcuacaacgccgugcugacccacgugaagaucaacgacaagugccccuccaccggcgaggcgcaccucgccgaggagaacgagggggacaacgccugcaagcggaccuacagcgaccggggcugggggaacggcugcgggcuguucggcaagggcuccaucgucgccugcgccaaguucacgugcgcgaaguccaugagccuguucgagguggaccagaccaagauccaguacgucauccgcgcccagcuccacgugggggccaagcaggagaacuggaacaccgacaucaagacccugaaguucgacgcccugagcggcagccaggagguggaguucaucggguacggcaaggccacgcucgagugccagguccagaccgcgguggacuucgggaacuccuacaucgccgagauggagaccgagagcuggaucguggaccggcagugggcccaggaccugacccugcccuggcaguccggcagcggcggggucuggcgcgagaugcaccaccucguggaguucgagcccccgcacgccgccacgauccgggugcuggcgcugggcaaccaggaggggucccucaagaccgcccugaccggcgccaugcgcgucaccaaggacacgaacgacaacaaccuguacaagcuccacgggggccacgugagcugccgggugaagcuguccgcccugacccucaagggcaccagcuacaagaucugcaccgacaagauguucuucgucaagaaccccacggacaccgggcacggcaccguggugaugcaggucaagguguccaagggggcgcccugccgcaucccggugaucgucgccgacgaccugaccgccgccaucaacaagggcauccuggugaccgugaacccgaucgccagcacgaacgacgacgagguccucaucgaggugaacccgcccuucggcgacuccuacaucaucguggggcggggcgacagccgccugaccuaccaguggcacaaggagggguccagcaucggaagcacgcugggcaaggccuuuucaacaacuuugaagggagcucaaagacuggcagcguugggcgacacagccugggacuuuggcucuauuggaggggucuucaacuccauagguagagccguucaccaaguguuuggaggugccuucagaacacucuuugggggaaugucuuggaucacacaagggcuaaugggugcccuacugcucuggaugggcgucaacgcacgagaccgaucaauugcuuuggccuucuuagccacaggaggugugcucguguucuuagcgaccaaugugcacgccugaggacuaguuauaagacugacuagcccgaugggccucccaacgggcccuccuccccuccuugcaccgagauuaaucaaaggcucuuuucagagccaccaaaaaaaaaaaaaaaaaaaaaaaaaaaaaaaaaaaaaaaaaaaaaaaaaaaaaaaaaaaaaaaaaaaaaaaaaaaaaaaaaaaaaaaaaaaaaaaaaaaaa

SEQ ID NO: 2200 - RNA, 2262 nt, Artificial Sequence
  mRNA product Design i-3 (hSL-A100) comprising derived and/or modified sequence from YFV__NC_002031.1__SSjev(V3)-prMEdelstem_TM-JEV (polyprotein: aa122-681) (opt1)
aggagaaagcuuaccaugaacgagggcagcaucauguggcuggccucccucgccguggucaucgcgugcgccggggccgugacgcuggugcggaagaaccgcuggcuccugcugaacgucaccuccgaggaccucggcaagaccuucagcguggggaccggcaacugcacgaccaacauccuggaggccaaguacuggugccccgacuccauggaguacaacugccccaaccugagcccccgggaggagcccgacgacaucgacugcuggugcuacggcguggagaacguccgcguggccuacgggaagugcgacuccgcgggccggagccgccggucccgccgggccaucgaccuccccacccacgagaaccacgggcugaagacccgccaggagaaguggaugacgggccggaugggggagcgccagcugcagaagaucgagcggugguucgugcgcaacccguucuucgccgucaccgcccucaccaucgccuaccuggugggcagcaacaugacccagcggguggucaucgcgcugcucgugcuggccgugggccccgccuacuccgcccacugcaucgggaucacggaccgcgacuucaucgagggcguccacgggggcaccugggugagcgcgacccuggagcaggacaagugcgugaccgucauggcccccgacaagcccucccucgacaucagccuggagacgguggccaucgaccggccggccgaggugcgcaaggucugcuacaacgccgugcugacccacgugaagaucaacgacaagugccccuccaccggcgaggcgcaccucgccgaggagaacgagggggacaacgccugcaagcggaccuacagcgaccggggcugggggaacggcugcgggcuguucggcaagggcuccaucgucgccugcgccaaguucacgugcgcgaaguccaugagccuguucgagguggaccagaccaagauccaguacgucauccgcgcccagcuccacgugggggccaagcaggagaacuggaacaccgacaucaagacccugaaguucgacgcccugagcggcagccaggagguggaguucaucggguacggcaaggccacgcucgagugccagguccagaccgcgguggacuucgggaacuccuacaucgccgagauggagaccgagagcuggaucguggaccggcagugggcccaggaccugacccugcccuggcaguccggcagcggcggggucuggcgcgagaugcaccaccucguggaguucgagcccccgcacgccgccacgauccgggugcuggcgcugggcaaccaggaggggucccucaagaccgcccugaccggcgccaugcgcgucaccaaggacacgaacgacaacaaccuguacaagcuccacgggggccacgugagcugccgggugaagcuguccgcccugacccucaagggcaccagcuacaagaucugcaccgacaagauguucuucgucaagaaccccacggacaccgggcacggcaccguggugaugcaggucaagguguccaagggggcgcccugccgcaucccggugaucgucgccgacgaccugaccgccgccaucaacaagggcauccuggugaccgugaacccgaucgccagcacgaacgacgacgagguccucaucgaggugaacccgcccuucggcgacuccuacaucaucguggggcggggcgacagccgccugaccuaccaguggcacaaggagggguccagcaucggcagcacccuggggaaggccuucuccaccacgcucaagggcgcccagcgccuggcggcccugggggacaccgccugggacuucggcagcaucgggggcguguucaacuccaucggccgggccguccaccagguguucgggggcgccuuccgcacccucuucgggggcaugagcuggaucacccaggggcugaugggcgcgcugcuccuguggaugggggugaacgcccgggaccgcuccaucgcccuggccuuccucgcgacgggcggcguccugguguuccuggccaccaacgugcacgccugaggacuaguuauaagacugacuagcccgaugggccucccaacgggcccuccuccccuccuugcaccgagauuaaucaaaggcucuuuucagagccaccaaaaaaaaaaaaaaaaaaaaaaaaaaaaaaaaaaaaaaaaaaaaaaaaaaaaaaaaaaaaaaaaaaaaaaaaaaaaaaaaaaaaaaaaaaaaaaaaaaaaa

SEQ ID NO: 2201 - protein, 420 aa, Artificial Sequence
  derived and/or modified protein sequence (wt) from YFV__NC_002031.1__eSS-NS1-Y (polyprotein: aa758-1177)
MSMSMILVGVIMMFLSLGVGADQGCAINFGKRELKCGDGIFIFRDSDDWLNKYSYYPEDPVKLASIVKASFEEGKCGLNSVDSLEHEMWRSRADEINAIFEENEVDISVVVQDPKNVYQRGTHPFSRIRDGLQYGWKTWGKNLVFSPGRKNGSFIIDGKSRKECPFSNRVWNSFQIEEFGTGVFTTRVYMDAVFEYTIDCDGSILGAAVNGKKSAHGSPTFWMGSHEVNGTWMIHTLEALDYKECEWPLTHTIGTSVEESEMFMPRSIGGPVSSHNHIPGYKVQTNGPWMQVPLEVKREACPGTSVIIDGNCDGRGKSTRSTTDSGKVIPEWCCRSCTMPPVSFHGSDGCWYPMEIRPRKTHESHLVRSWVTAGEIHAVPFGLVSMMIAMEVVLRKRQGPKQMLVGGVVLLGAMLVGQVT

SEQ ID NO: 2202 - protein, 373 aa, Artificial Sequence
  derived and/or modified protein sequence (wt) from YFV__NC_002031.1__eSS-NS1 (polyprotein: aa758-1130)
MSMSMILVGVIMMFLSLGVGADQGCAINFGKRELKCGDGIFIFRDSDDWLNKYSYYPEDPVKLASIVKASFEEGKCGLNSVDSLEHEMWRSRADEINAIFEENEVDISVVVQDPKNVYQRGTHPFSRIRDGLQYGWKTWGKNLVFSPGRKNGSFIIDGKSRKECPFSNRVWNSFQIEEFGTGVFTTRVYMDAVFEYTIDCDGSILGAAVNGKKSAHGSPTFWMGSHEVNGTWMIHTLEALDYKECEWPLTHTIGTSVEESEMFMPRSIGGPVSSHNHIPGYKVQTNGPWMQVPLEVKREACPGTSVIIDGNCDGRGKSTRSTTDSGKVIPEWCCRSCTMPPVSFHGSDGCWYPMEIRPRKTHESHLVRSWVTA

SEQ ID NO: 2203 - protein, 399 aa, Artificial Sequence
  derived and/or modified protein sequence (wt) from YFV__NC_002031.1__NS1-Y (polyprotein: aa779-1177)
DQGCAINFGKRELKCGDGIFIFRDSDDWLNKYSYYPEDPVKLASIVKASFEEGKCGLNSVDSLEHEMWRSRADEINAIFEENEVDISVVVQDPKNVYQRGTHPFSRIRDGLQYGWKTWGKNLVFSPGRKNGSFIIDGKSRKECPFSNRVWNSFQIEEFGTGVFTTRVYMDAVFEYTIDCDGSILGAAVNGKKSAHGSPTFWMGSHEVNGTWMIHTLEALDYKECEWPLTHTIGTSVEESEMFMPRSIGGPVSSHNHIPGYKVQTNGPWMQVPLEVKREACPGTSVIIDGNCDGRGKSTRSTTDSGKVIPEWCCRSCTMPPVSFHGSDGCWYPMEIRPRKTHESHLVRSWVTAGEIHAVPFGLVSMMIAMEVVLRKRQGPKQMLVGGVVLLGAMLVGQVT

SEQ ID NO: 2204 - protein, 352 aa, Artificial Sequence
  derived and/or modified protein sequence (wt) from YFV__NC_002031.1__NS1 (polyprotein: aa779-1130)
DQGCAINFGKRELKCGDGIFIFRDSDDWLNKYSYYPEDPVKLASIVKASFEEGKCGLNSVDSLEHEMWRSRADEINAIFEENEVDISVVVQDPKNVYQRGTHPFSRIRDGLQYGWKTWGKNLVFSPGRKNGSFIIDGKSRKECPFSNRVWNSFQIEEFGTGVFTTRVYMDAVFEYTIDCDGSILGAAVNGKKSAHGSPTFWMGSHEVNGTWMIHTLEALDYKECEWPLTHTIGTSVEESEMFMPRSIGGPVSSHNHIPGYKVQTNGPWMQVPLEVKREACPGTSVIIDGNCDGRGKSTRSTTDSGKVIPEWCCRSCTMPPVSFHGSDGCWYPMEIRPRKTHESHLVRSWVTA

SEQ ID NO: 2205 - protein, 370 aa, Artificial Sequence
  derived and/or modified protein sequence (wt) from YFV__NC_002031.1__SSIgE-NS1 (polyprotein: aa779-1130)
MDWTWILFLVAAATRVHSDQGCAINFGKRELKCGDGIFIFRDSDDWLNKYSYYPEDPVKLASIVKASFEEGKCGLNSVDSLEHEMWRSRADEINAIFEENEVDISVVVQDPKNVYQRGTHPFSRIRDGLQYGWKTWGKNLVFSPGRKNGSFIIDGKSRKECPFSNRVWNSFQIEEFGTGVFTTRVYMDAVFEYTIDCDGSILGAAVNGKKSAHGSPTFWMGSHEVNGTWMIHTLEALDYKECEWPLTHTIGTSVEESEMFMPRSIGGPVSSHNHIPGYKVQTNGPWMQVPLEVKREACPGTSVIIDGNCDGRGKSTRSTTDSGKVIPEWCCRSCTMPPVSFHGSDGCWYPMEIRPRKTHESHLVRSWVTA

SEQ ID NO: 2206 - RNA, 1263 nt, Artificial Sequence
  derived and/or modified CDS sequence (wt) from YFV__NC_002031.1__eSS-NS1-Y (polyprotein: aa758-1177)
auguccaugagcaugaucuugguaggagugaucaugauguuuuugucucuaggaguuggggcggaucaaggaugcgccaucaacuuuggcaagagagagcucaagugcggagaugguaucuucauauuuagagacucugaugacuggcugaacaaguacucauacuauccagaagauccugugaagcuugcaucaauagugaaagccucuuuugaagaagggaaguguggccuaaauucaguugacucccuugagcaugagauguggagaagcagggcagaugagaucaaugccauuuuugaggaaaacgagguggacauuucuguugucgugcaggauccaaagaauguuuaccagagaggaacucauccauuuuccagaauucgggauggucugcaguaugguuggaagacuugggguaagaaccuuguguucuccccagggaggaagaauggaagcuucaucauagauggaaaguccaggaaagaaugcccguuuucaaaccgggucuggaauucuuuccagauagaggaguuugggacgggaguguucaccacacgcguguacauggacgcagucuuugaauacaccauagacugcgauggaucuaucuugggugcagcggugaacggaaaaaagagugcccauggcucuccaacauuuuggaugggaagucaugaaguaaaugggacauggaugauccacaccuuggaggcauuagauuacaaggagugugaguggccacugacacauacgauuggaacaucaguugaagagagugaaauguucaugccgagaucaaucggaggcccaguuagcucucacaaucauaucccuggauacaagguucagacgaacggaccuuggaugcagguaccacuagaagugaagagagaagcuugcccagggacuagcgugaucauugauggcaacugugauggacggggaaaaucaaccagauccaccacggauagcgggaaaguuauuccugaaugguguugccgcuccugcacaaugccgccugugagcuuccaugguagugauggguguugguaucccauggaaauuaggccaaggaaaacgcaugaaagccaucuggugcgcuccuggguuacagcuggagaaauacaugcugucccuuuugguuuggugagcaugaugauagcaauggaagugguccuaaggaaaagacagggaccaaagcaaauguugguuggaggaguagugcucuugggagcaaugcuggucgggcaaguaacuuga

SEQ ID NO: 2207 - RNA, 1122 nt, Artificial Sequence
  derived and/or modified CDS sequence (wt) from YFV__NC_002031.1__eSS-NS1 (polyprotein: aa758-1130)
auguccaugagcaugaucuugguaggagugaucaugauguuuuugucucuaggaguuggggcggaucaaggaugcgccaucaacuuuggcaagagagagcucaagugcggagaugguaucuucauauuuagagacucugaugacuggcugaacaaguacucauacuauccagaagauccugugaagcuugcaucaauagugaaagccucuuuugaagaagggaaguguggccuaaauucaguugacucccuugagcaugagauguggagaagcagggcagaugagaucaaugccauuuuugaggaaaacgagguggacauuucuguugucgugcaggauccaaagaauguuuaccagagaggaacucauccauuuuccagaauucgggauggucugcaguaugguuggaagacuugggguaagaaccuuguguucuccccagggaggaagaauggaagcuucaucauagauggaaaguccaggaaagaaugcccguuuucaaaccgggucuggaauucuuuccagauagaggaguuugggacgggaguguucaccacacgcguguacauggacgcagucuuugaauacaccauagacugcgauggaucuaucuugggugcagcggugaacggaaaaaagagugcccauggcucuccaacauuuuggaugggaagucaugaaguaaaugggacauggaugauccacaccuuggaggcauuagauuacaaggagugugaguggccacugacacauacgauuggaacaucaguugaagagagugaaauguucaugccgagaucaaucggaggcccaguuagcucucacaaucauaucccuggauacaagguucagacgaacggaccuuggaugcagguaccacuagaagugaagagagaagcuugcccagggacuagcgugaucauugauggcaacugugauggacggggaaaaucaaccagauccaccacggauagcgggaaaguuauuccugaaugguguugccgcuccugcacaaugccgccugugagcuuccaugguagugauggguguugguaucccauggaaauuaggccaaggaaaacgcaugaaagccaucuggugcgcuccuggguuacagcuuga

SEQ ID NO: 2208 - RNA, 1197 nt, Artificial Sequence
  derived and/or modified CDS sequence (wt) from YFV__NC_002031.1__NS1-Y (polyprotein: aa779-1177)
gaucaaggaugcgccaucaacuuuggcaagagagagcucaagugcggagaugguaucuucauauuuagagacucugaugacuggcugaacaaguacucauacuauccagaagauccugugaagcuugcaucaauagugaaagccucuuuugaagaagggaaguguggccuaaauucaguugacucccuugagcaugagauguggagaagcagggcagaugagaucaaugccauuuuugaggaaaacgagguggacauuucuguugucgugcaggauccaaagaauguuuaccagagaggaacucauccauuuuccagaauucgggauggucugcaguaugguuggaagacuugggguaagaaccuuguguucuccccagggaggaagaauggaagcuucaucauagauggaaaguccaggaaagaaugcccguuuucaaaccgggucuggaauucuuuccagauagaggaguuugggacgggaguguucaccacacgcguguacauggacgcagucuuugaauacaccauagacugcgauggaucuaucuugggugcagcggugaacggaaaaaagagugcccauggcucuccaacauuuuggaugggaagucaugaaguaaaugggacauggaugauccacaccuuggaggcauuagauuacaaggagugugaguggccacugacacauacgauuggaacaucaguugaagagagugaaauguucaugccgagaucaaucggaggcccaguuagcucucacaaucauaucccuggauacaagguucagacgaacggaccuuggaugcagguaccacuagaagugaagagagaagcuugcccagggacuagcgugaucauugauggcaacugugauggacggggaaaaucaaccagauccaccacggauagcgggaaaguuauuccugaaugguguugccgcuccugcacaaugccgccugugagcuuccaugguagugauggguguugguaucccauggaaauuaggccaaggaaaacgcaugaaagccaucuggugcgcuccuggguuacagcuggagaaauacaugcugucccuuuugguuuggugagcaugaugauagcaauggaagugguccuaaggaaaagacagggaccaaagcaaauguugguuggaggaguagugcucuugggagcaaugcuggucgggcaaguaacu

SEQ ID NO: 2209 - RNA, 1056 nt, Artificial Sequence
  derived and/or modified CDS sequence (wt) from YFV__NC_002031.1__NS1 (polyprotein: aa779-1130)
gaucaaggaugcgccaucaacuuuggcaagagagagcucaagugcggagaugguaucuucauauuuagagacucugaugacuggcugaacaaguacucauacuauccagaagauccugugaagcuugcaucaauagugaaagccucuuuugaagaagggaaguguggccuaaauucaguugacucccuugagcaugagauguggagaagcagggcagaugagaucaaugccauuuuugaggaaaacgagguggacauuucuguugucgugcaggauccaaagaauguuuaccagagaggaacucauccauuuuccagaauucgggauggucugcaguaugguuggaagacuugggguaagaaccuuguguucuccccagggaggaagaauggaagcuucaucauagauggaaaguccaggaaagaaugcccguuuucaaaccgggucuggaauucuuuccagauagaggaguuugggacgggaguguucaccacacgcguguacauggacgcagucuuugaauacaccauagacugcgauggaucuaucuugggugcagcggugaacggaaaaaagagugcccauggcucuccaacauuuuggaugggaagucaugaaguaaaugggacauggaugauccacaccuuggaggcauuagauuacaaggagugugaguggccacugacacauacgauuggaacaucaguugaagagagugaaauguucaugccgagaucaaucggaggcccaguuagcucucacaaucauaucccuggauacaagguucagacgaacggaccuuggaugcagguaccacuagaagugaagagagaagcuugcccagggacuagcgugaucauugauggcaacugugauggacggggaaaaucaaccagauccaccacggauagcgggaaaguuauuccugaaugguguugccgcuccugcacaaugccgccugugagcuuccaugguagugauggguguugguaucccauggaaauuaggccaaggaaaacgcaugaaagccaucuggugcgcuccuggguuacagcu

SEQ ID NO: 2210 - RNA, 1113 nt, Artificial Sequence
  derived and/or modified CDS sequence (wt) from YFV__NC_002031.1__SSIgE-NS1 (polyprotein: aa779-1130)
auggacuggaccuggauccuguuccucguggccgccgcgacccgcguccacagcgaucaaggaugcgccaucaacuuuggcaagagagagcucaagugcggagaugguaucuucauauuuagagacucugaugacuggcugaacaaguacucauacuauccagaagauccugugaagcuugcaucaauagugaaagccucuuuugaagaagggaaguguggccuaaauucaguugacucccuugagcaugagauguggagaagcagggcagaugagaucaaugccauuuuugaggaaaacgagguggacauuucuguugucgugcaggauccaaagaauguuuaccagagaggaacucauccauuuuccagaauucgggauggucugcaguaugguuggaagacuugggguaagaaccuuguguucuccccagggaggaagaauggaagcuucaucauagauggaaaguccaggaaagaaugcccguuuucaaaccgggucuggaauucuuuccagauagaggaguuugggacgggaguguucaccacacgcguguacauggacgcagucuuugaauacaccauagacugcgauggaucuaucuugggugcagcggugaacggaaaaaagagugcccauggcucuccaacauuuuggaugggaagucaugaaguaaaugggacauggaugauccacaccuuggaggcauuagauuacaaggagugugaguggccacugacacauacgauuggaacaucaguugaagagagugaaauguucaugccgagaucaaucggaggcccaguuagcucucacaaucauaucccuggauacaagguucagacgaacggaccuuggaugcagguaccacuagaagugaagagagaagcuugcccagggacuagcgugaucauugauggcaacugugauggacggggaaaaucaaccagauccaccacggauagcgggaaaguuauuccugaaugguguugccgcuccugcacaaugccgccugugagcuuccaugguagugauggguguugguaucccauggaaauuaggccaaggaaaacgcaugaaagccaucuggugcgcuccuggguuacagcuuga

SEQ ID NO: 2211 - RNA, 1263 nt, Artificial Sequence
  derived and/or modified CDS sequence (opt1) from YFV__NC_002031.1__eSS-NS1-Y (polyprotein: aa758-1177)
augagcauguccaugauccuggugggcgucaucaugauguuccucagccugggggugggcgccgaccaggggugcgccaucaacuucggcaagcgcgagcugaagugcggggacggcaucuucaucuuccgggacuccgacgacuggcucaacaaguacagcuacuaccccgaggacccggugaagcuggcguccaucgucaaggccagcuucgaggagggcaagugcgggcugaacuccguggacagccucgagcacgagauguggcgcucccgggccgacgagaucaacgccaucuucgaggagaacgagguggacaucagcgucguggugcaggaccccaagaacgucuaccagcgcggcacccaccccuucucccggauccgcgacgggcugcaguacggcuggaagaccugggggaagaaccugguguucagccccggccggaagaacggcuccuucaucaucgacggcaagagccgcaaggagugcccguucuccaaccggguguggaacagcuuccagaucgaggaguucgggacgggggucuucaccacccgcguguacauggacgccguguucgaguacaccaucgacugcgacggcuccauccucggcgcggccgucaacgggaagaaguccgcccacggcagccccacguucuggauggggagccacgaggugaacggcaccuggaugauccacacccuggaggcccuggacuacaaggagugcgaguggccccucacccacacgaucgggaccagcguggaggaguccgagauguucaugccccggagcaucggcggcccggucuccagccacaaccacauccccggguacaaggugcagaccaacggccccuggaugcaggucccccuggaggugaagcgcgaggcgugcccggggaccuccgugaucaucgacggcaacugcgacgggcggggcaagagcacgcgcuccaccaccgacagcggcaaggugauccccgaguggugcugccgguccugcaccaugccgcccgucagcuuccacggguccgacggcugcugguaccccauggagauccgcccccggaagacgcacgagagccaccuggugcgcuccugggucaccgccggggagauccacgccgugcccuucggccucgugagcaugaugaucgccauggaggucgugcugcggaagcgccaggggcccaagcagaugcuggugggcggcgucgugcuccugggggccaugcuggugggccaggucaccuga

SEQ ID NO: 2212 - RNA, 1122 nt, Artificial Sequence
  derived and/or modified CDS sequence (opt1) from YFV__NC_002031.1__eSS-NS1 (polyprotein: aa758-1130)
augagcauguccaugauccuggugggcgucaucaugauguuccucagccugggggugggcgccgaccaggggugcgccaucaacuucggcaagcgcgagcugaagugcggggacggcaucuucaucuuccgggacuccgacgacuggcucaacaaguacagcuacuaccccgaggacccggugaagcuggcguccaucgucaaggccagcuucgaggagggcaagugcgggcugaacuccguggacagccucgagcacgagauguggcgcucccgggccgacgagaucaacgccaucuucgaggagaacgagguggacaucagcgucguggugcaggaccccaagaacgucuaccagcgcggcacccaccccuucucccggauccgcgacgggcugcaguacggcuggaagaccugggggaagaaccugguguucagccccggccggaagaacggcuccuucaucaucgacggcaagagccgcaaggagugcccguucuccaaccggguguggaacagcuuccagaucgaggaguucgggacgggggucuucaccacccgcguguacauggacgccguguucgaguacaccaucgacugcgacggcuccauccucggcgcggccgucaacgggaagaaguccgcccacggcagccccacguucuggauggggagccacgaggugaacggcaccuggaugauccacacccuggaggcccuggacuacaaggagugcgaguggccccucacccacacgaucgggaccagcguggaggaguccgagauguucaugccccggagcaucggcggcccggucuccagccacaaccacauccccggguacaaggugcagaccaacggccccuggaugcaggucccccuggaggugaagcgcgaggcgugcccggggaccuccgugaucaucgacggcaacugcgacgggcggggcaagagcacgcgcuccaccaccgacagcggcaaggugauccccgaguggugcugccgguccugcaccaugccgcccgucagcuuccacggguccgacggcugcugguaccccauggagauccgcccccggaagacgcacgagagccaccuggugcgcuccugggucaccgccuga

SEQ ID NO: 2213 - RNA, 1197 nt, Artificial Sequence
  derived and/or modified CDS sequence (opt1) from YFV__NC_002031.1__NS1-Y (polyprotein: aa779-1177)
gaccaggggugcgccaucaacuucggcaagcgcgagcugaagugcggggacggcaucuucaucuuccgggacuccgacgacuggcucaacaaguacagcuacuaccccgaggacccggugaagcuggcguccaucgucaaggccagcuucgaggagggcaagugcgggcugaacuccguggacagccucgagcacgagauguggcgcucccgggccgacgagaucaacgccaucuucgaggagaacgagguggacaucagcgucguggugcaggaccccaagaacgucuaccagcgcggcacccaccccuucucccggauccgcgacgggcugcaguacggcuggaagaccugggggaagaaccugguguucagccccggccggaagaacggcuccuucaucaucgacggcaagagccgcaaggagugcccguucuccaaccggguguggaacagcuuccagaucgaggaguucgggacgggggucuucaccacccgcguguacauggacgccguguucgaguacaccaucgacugcgacggcuccauccucggcgcggccgucaacgggaagaaguccgcccacggcagccccacguucuggauggggagccacgaggugaacggcaccuggaugauccacacccuggaggcccuggacuacaaggagugcgaguggccccucacccacacgaucgggaccagcguggaggaguccgagauguucaugccccggagcaucggcggcccggucuccagccacaaccacauccccggguacaaggugcagaccaacggccccuggaugcaggucccccuggaggugaagcgcgaggcgugcccggggaccuccgugaucaucgacggcaacugcgacgggcggggcaagagcacgcgcuccaccaccgacagcggcaaggugauccccgaguggugcugccgguccugcaccaugccgcccgucagcuuccacggguccgacggcugcugguaccccauggagauccgcccccggaagacgcacgagagccaccuggugcgcuccugggucaccgccggggagauccacgccgugcccuucggccucgugagcaugaugaucgccauggaggucgugcugcggaagcgccaggggcccaagcagaugcuggugggcggcgucgugcuccugggggccaugcuggugggccaggucacc

SEQ ID NO: 2214 - RNA, 1056 nt, Artificial Sequence
  derived and/or modified CDS sequence (opt1) from YFV__NC_002031.1__NS1 (polyprotein: aa779-1130)
gaccaggggugcgccaucaacuucggcaagcgcgagcugaagugcggggacggcaucuucaucuuccgggacuccgacgacuggcucaacaaguacagcuacuaccccgaggacccggugaagcuggcguccaucgucaaggccagcuucgaggagggcaagugcgggcugaacuccguggacagccucgagcacgagauguggcgcucccgggccgacgagaucaacgccaucuucgaggagaacgagguggacaucagcgucguggugcaggaccccaagaacgucuaccagcgcggcacccaccccuucucccggauccgcgacgggcugcaguacggcuggaagaccugggggaagaaccugguguucagccccggccggaagaacggcuccuucaucaucgacggcaagagccgcaaggagugcccguucuccaaccggguguggaacagcuuccagaucgaggaguucgggacgggggucuucaccacccgcguguacauggacgccguguucgaguacaccaucgacugcgacggcuccauccucggcgcggccgucaacgggaagaaguccgcccacggcagccccacguucuggauggggagccacgaggugaacggcaccuggaugauccacacccuggaggcccuggacuacaaggagugcgaguggccccucacccacacgaucgggaccagcguggaggaguccgagauguucaugccccggagcaucggcggcccggucuccagccacaaccacauccccggguacaaggugcagaccaacggccccuggaugcaggucccccuggaggugaagcgcgaggcgugcccggggaccuccgugaucaucgacggcaacugcgacgggcggggcaagagcacgcgcuccaccaccgacagcggcaaggugauccccgaguggugcugccgguccugcaccaugccgcccgucagcuuccacggguccgacggcugcugguaccccauggagauccgcccccggaagacgcacgagagccaccuggugcgcuccugggucaccgcc

SEQ ID NO: 2215 - RNA, 1113 nt, Artificial Sequence
  derived and/or modified CDS sequence (opt1) from YFV__NC_002031.1__SSIgE-NS1 (polyprotein: aa779-1130)
auggacuggaccuggauccuguuccucguggccgccgcgacccgcguccacagcgaccaggggugcgccaucaacuucggcaagcgcgagcugaagugcggggacggcaucuucaucuuccgggacuccgacgacuggcucaacaaguacagcuacuaccccgaggacccggugaagcuggcguccaucgucaaggccagcuucgaggagggcaagugcgggcugaacuccguggacagccucgagcacgagauguggcgcucccgggccgacgagaucaacgccaucuucgaggagaacgagguggacaucagcgucguggugcaggaccccaagaacgucuaccagcgcggcacccaccccuucucccggauccgcgacgggcugcaguacggcuggaagaccugggggaagaaccugguguucagccccggccggaagaacggcuccuucaucaucgacggcaagagccgcaaggagugcccguucuccaaccggguguggaacagcuuccagaucgaggaguucgggacgggggucuucaccacccgcguguacauggacgccguguucgaguacaccaucgacugcgacggcuccauccucggcgcggccgucaacgggaagaaguccgcccacggcagccccacguucuggauggggagccacgaggugaacggcaccuggaugauccacacccuggaggcccuggacuacaaggagugcgaguggccccucacccacacgaucgggaccagcguggaggaguccgagauguucaugccccggagcaucggcggcccggucuccagccacaaccacauccccggguacaaggugcagaccaacggccccuggaugcaggucccccuggaggugaagcgcgaggcgugcccggggaccuccgugaucaucgacggcaacugcgacgggcggggcaagagcacgcgcuccaccaccgacagcggcaaggugauccccgaguggugcugccgguccugcaccaugccgcccgucagcuuccacggguccgacggcugcugguaccccauggagauccgcccccggaagacgcacgagagccaccuggugcgcuccugggucaccgccuga

SEQ ID NO: 2216 - RNA, 1263 nt, Artificial Sequence
  derived and/or modified CDS sequence (opt2) from YFV__NC_002031.1__eSS-NS1-Y (polyprotein: aa758-1177)
auguccauguccaugauccucgucggcgucaucaugauguuccucucccucggcgucggcgccgaccagggcugcgccaucaacuucggcaagcgcgagcucaagugcggcgacggcaucuucaucuuccgcgacuccgacgacuggcucaacaaguacuccuacuaccccgaggaccccgucaagcucgccuccaucgucaaggccuccuucgaggagggcaagugcggccucaacuccgucgacucccucgagcacgagauguggcgcucccgcgccgacgagaucaacgccaucuucgaggagaacgaggucgacaucuccgucgucguccaggaccccaagaacgucuaccagcgcggcacccaccccuucucccgcauccgcgacggccuccaguacggcuggaagaccuggggcaagaaccucgucuucucccccggccgcaagaacggcuccuucaucaucgacggcaagucccgcaaggagugccccuucuccaaccgcgucuggaacuccuuccagaucgaggaguucggcaccggcgucuucaccacccgcgucuacauggacgccgucuucgaguacaccaucgacugcgacggcuccauccucggcgccgccgucaacggcaagaaguccgcccacggcucccccaccuucuggaugggcucccacgaggucaacggcaccuggaugauccacacccucgaggcccucgacuacaaggagugcgaguggccccucacccacaccaucggcaccuccgucgaggaguccgagauguucaugccccgcuccaucggcggccccgucuccucccacaaccacauccccggcuacaagguccagaccaacggccccuggaugcaggucccccucgaggucaagcgcgaggccugccccggcaccuccgucaucaucgacggcaacugcgacggccgcggcaaguccacccgcuccaccaccgacuccggcaaggucauccccgaguggugcugccgcuccugcaccaugccccccgucuccuuccacggcuccgacggcugcugguaccccauggagauccgcccccgcaagacccacgagucccaccucguccgcuccugggucaccgccggcgagauccacgccguccccuucggccucgucuccaugaugaucgccauggaggucguccuccgcaagcgccagggccccaagcagaugcucgucggcggcgucguccuccucggcgccaugcucgucggccaggucaccuga

SEQ ID NO: 2217 - RNA, 1122 nt, Artificial Sequence
  derived and/or modified CDS sequence (opt2) from YFV__NC_002031.1__eSS-NS1 (polyprotein: aa758-1130)
auguccauguccaugauccucgucggcgucaucaugauguuccucucccucggcgucggcgccgaccagggcugcgccaucaacuucggcaagcgcgagcucaagugcggcgacggcaucuucaucuuccgcgacuccgacgacuggcucaacaaguacuccuacuaccccgaggaccccgucaagcucgccuccaucgucaaggccuccuucgaggagggcaagugcggccucaacuccgucgacucccucgagcacgagauguggcgcucccgcgccgacgagaucaacgccaucuucgaggagaacgaggucgacaucuccgucgucguccaggaccccaagaacgucuaccagcgcggcacccaccccuucucccgcauccgcgacggccuccaguacggcuggaagaccuggggcaagaaccucgucuucucccccggccgcaagaacggcuccuucaucaucgacggcaagucccgcaaggagugccccuucuccaaccgcgucuggaacuccuuccagaucgaggaguucggcaccggcgucuucaccacccgcgucuacauggacgccgucuucgaguacaccaucgacugcgacggcuccauccucggcgccgccgucaacggcaagaaguccgcccacggcucccccaccuucuggaugggcucccacgaggucaacggcaccuggaugauccacacccucgaggcccucgacuacaaggagugcgaguggccccucacccacaccaucggcaccuccgucgaggaguccgagauguucaugccccgcuccaucggcggccccgucuccucccacaaccacauccccggcuacaagguccagaccaacggccccuggaugcaggucccccucgaggucaagcgcgaggccugccccggcaccuccgucaucaucgacggcaacugcgacggccgcggcaaguccacccgcuccaccaccgacuccggcaaggucauccccgaguggugcugccgcuccugcaccaugccccccgucuccuuccacggcuccgacggcugcugguaccccauggagauccgcccccgcaagacccacgagucccaccucguccgcuccugggucaccgccuga

SEQ ID NO: 2218 - RNA, 1197 nt, Artificial Sequence
  derived and/or modified CDS sequence (opt2) from YFV__NC_002031.1__NS1-Y (polyprotein: aa779-1177)
gaccagggcugcgccaucaacuucggcaagcgcgagcucaagugcggcgacggcaucuucaucuuccgcgacuccgacgacuggcucaacaaguacuccuacuaccccgaggaccccgucaagcucgccuccaucgucaaggccuccuucgaggagggcaagugcggccucaacuccgucgacucccucgagcacgagauguggcgcucccgcgccgacgagaucaacgccaucuucgaggagaacgaggucgacaucuccgucgucguccaggaccccaagaacgucuaccagcgcggcacccaccccuucucccgcauccgcgacggccuccaguacggcuggaagaccuggggcaagaaccucgucuucucccccggccgcaagaacggcuccuucaucaucgacggcaagucccgcaaggagugccccuucuccaaccgcgucuggaacuccuuccagaucgaggaguucggcaccggcgucuucaccacccgcgucuacauggacgccgucuucgaguacaccaucgacugcgacggcuccauccucggcgccgccgucaacggcaagaaguccgcccacggcucccccaccuucuggaugggcucccacgaggucaacggcaccuggaugauccacacccucgaggcccucgacuacaaggagugcgaguggccccucacccacaccaucggcaccuccgucgaggaguccgagauguucaugccccgcuccaucggcggccccgucuccucccacaaccacauccccggcuacaagguccagaccaacggccccuggaugcaggucccccucgaggucaagcgcgaggccugccccggcaccuccgucaucaucgacggcaacugcgacggccgcggcaaguccacccgcuccaccaccgacuccggcaaggucauccccgaguggugcugccgcuccugcaccaugccccccgucuccuuccacggcuccgacggcugcugguaccccauggagauccgcccccgcaagacccacgagucccaccucguccgcuccugggucaccgccggcgagauccacgccguccccuucggccucgucuccaugaugaucgccauggaggucguccuccgcaagcgccagggccccaagcagaugcucgucggcggcgucguccuccucggcgccaugcucgucggccaggucacc

SEQ ID NO: 2219 - RNA, 1056 nt, Artificial Sequence
  derived and/or modified CDS sequence (opt2) from YFV__NC_002031.1__NS1 (polyprotein: aa779-1130)
gaccagggcugcgccaucaacuucggcaagcgcgagcucaagugcggcgacggcaucuucaucuuccgcgacuccgacgacuggcucaacaaguacuccuacuaccccgaggaccccgucaagcucgccuccaucgucaaggccuccuucgaggagggcaagugcggccucaacuccgucgacucccucgagcacgagauguggcgcucccgcgccgacgagaucaacgccaucuucgaggagaacgaggucgacaucuccgucgucguccaggaccccaagaacgucuaccagcgcggcacccaccccuucucccgcauccgcgacggccuccaguacggcuggaagaccuggggcaagaaccucgucuucucccccggccgcaagaacggcuccuucaucaucgacggcaagucccgcaaggagugccccuucuccaaccgcgucuggaacuccuuccagaucgaggaguucggcaccggcgucuucaccacccgcgucuacauggacgccgucuucgaguacaccaucgacugcgacggcuccauccucggcgccgccgucaacggcaagaaguccgcccacggcucccccaccuucuggaugggcucccacgaggucaacggcaccuggaugauccacacccucgaggcccucgacuacaaggagugcgaguggccccucacccacaccaucggcaccuccgucgaggaguccgagauguucaugccccgcuccaucggcggccccgucuccucccacaaccacauccccggcuacaagguccagaccaacggccccuggaugcaggucccccucgaggucaagcgcgaggccugccccggcaccuccgucaucaucgacggcaacugcgacggccgcggcaaguccacccgcuccaccaccgacuccggcaaggucauccccgaguggugcugccgcuccugcaccaugccccccgucuccuuccacggcuccgacggcugcugguaccccauggagauccgcccccgcaagacccacgagucccaccucguccgcuccugggucaccgcc

SEQ ID NO: 2220 - RNA, 1113 nt, Artificial Sequence
  derived and/or modified CDS sequence (opt2) from YFV__NC_002031.1__SSIgE-NS1 (polyprotein: aa779-1130)
auggacuggaccuggauccucuuccucgucgccgccgccacccgcguccacuccgaccagggcugcgccaucaacuucggcaagcgcgagcucaagugcggcgacggcaucuucaucuuccgcgacuccgacgacuggcucaacaaguacuccuacuaccccgaggaccccgucaagcucgccuccaucgucaaggccuccuucgaggagggcaagugcggccucaacuccgucgacucccucgagcacgagauguggcgcucccgcgccgacgagaucaacgccaucuucgaggagaacgaggucgacaucuccgucgucguccaggaccccaagaacgucuaccagcgcggcacccaccccuucucccgcauccgcgacggccuccaguacggcuggaagaccuggggcaagaaccucgucuucucccccggccgcaagaacggcuccuucaucaucgacggcaagucccgcaaggagugccccuucuccaaccgcgucuggaacuccuuccagaucgaggaguucggcaccggcgucuucaccacccgcgucuacauggacgccgucuucgaguacaccaucgacugcgacggcuccauccucggcgccgccgucaacggcaagaaguccgcccacggcucccccaccuucuggaugggcucccacgaggucaacggcaccuggaugauccacacccucgaggcccucgacuacaaggagugcgaguggccccucacccacaccaucggcaccuccgucgaggaguccgagauguucaugccccgcuccaucggcggccccgucuccucccacaaccacauccccggcuacaagguccagaccaacggccccuggaugcaggucccccucgaggucaagcgcgaggccugccccggcaccuccgucaucaucgacggcaacugcgacggccgcggcaaguccacccgcuccaccaccgacuccggcaaggucauccccgaguggugcugccgcuccugcaccaugccccccgucuccuuccacggcuccgacggcugcugguaccccauggagauccgcccccgcaagacccacgagucccaccucguccgcuccugggucaccgccuga

SEQ ID NO: 2221 - RNA, 1263 nt, Artificial Sequence
  derived and/or modified CDS sequence (opt3) from YFV__NC_002031.1__eSS-NS1-Y (polyprotein: aa758-1177)
augagcauguccaugauccuggugggcgucauuaugauguuccucucucuugggguuggagccgaccaggguugcgcuauaaacuuuggcaagagagagcugaaauguggggauggaaucuucauuuuuagggacucagaugacugguugaauaaguacaguuauuaccccgaagauccugugaaauuagcaagcaucguaaaggccuccuucgaggaaggcaaaugcggucugaacucuguggacucgcuagagcacgaaauguggcggucacgcgcggaugagauuaaugcuaucuuugaggaaaacgaggucgacauaagcgugguugugcaagauccaaagaaugucuaucagcgagggacccauccguucagucguaucagagacggacuccaguacggcuggaagacauggggcaaaaaccugguguuuucccccgggaggaagaauggaucuuucauuaucgaugguaaaagccggaaggaauguccuuuuuccaaccgcguauggaacucauuccagauugaggaguuuggcacugggguuuucacgaccagaguguauauggacgccgucuuugaauacacaaucgauugcgacggaaguauacuuggcgcagccgugaaugguaaaaagagcgcucacgggucuccaacuuucuggaugggaucccaugaggugaauggcaccuggaugauucacacacuggaagcauuggacuauaaggagugugaauggccccucacccauacuaucggcacaucagucgaggagagcgaaauguucaugccuaggaguauugggggaccaguuucuucccacaaccacauccccgguuacaaagugcaaaccaauggcccuuggaugcagguaccacuggaggugaagcgggaagccugcccggggacgagcgucaucauugauggaaacugugacggccgcgguaaaucgacucgaucuaccacagauuccgggaaggugauacccgaguggugcuguagaucaugcacuaugccuccaguuaguuuucauggcagcgacggauguugguaccccauggaaaucaggccucggaaaacccacgagucccaucuggugcguucuugggucacagcuggcgagauucacgccgugccauucgggcucguaagcaugaugaucgcgauggaaguuguguuacgcaagagacagggacccaaacagaugcuggucgguggcgugguccuuuugggggcaaugcuggugggacaaguuaccuga

SEQ ID NO: 2222 - RNA, 1122 nt, Artificial Sequence
  derived and/or modified CDS sequence (opt3) from YFV__NC_002031.1__eSS-NS1 (polyprotein: aa758-1130)
augagcauguccaugauccuggugggcgucauuaugauguuccucucucuugggguuggagccgaccaggguugcgcuauaaacuuuggcaagagagagcugaaauguggggauggaaucuucauuuuuagggacucagaugacugguugaauaaguacaguuauuaccccgaagauccugugaaauuagcaagcaucguaaaggccuccuucgaggaaggcaaaugcggucugaacucuguggacucgcuagagcacgaaauguggcggucacgcgcggaugagauuaaugcuaucuuugaggaaaacgaggucgacauaagcgugguugugcaagauccaaagaaugucuaucagcgagggacccauccguucagucguaucagagacggacuccaguacggcuggaagacauggggcaaaaaccugguguuuucccccgggaggaagaauggaucuuucauuaucgaugguaaaagccggaaggaauguccuuuuuccaaccgcguauggaacucauuccagauugaggaguuuggcacugggguuuucacgaccagaguguauauggacgccgucuuugaauacacaaucgauugcgacggaaguauacuuggcgcagccgugaaugguaaaaagagcgcucacgggucuccaacuuucuggaugggaucccaugaggugaauggcaccuggaugauucacacacuggaagcauuggacuauaaggagugugaauggccccucacccauacuaucggcacaucagucgaggagagcgaaauguucaugccuaggaguauugggggaccaguuucuucccacaaccacauccccgguuacaaagugcaaaccaauggcccuuggaugcagguaccacuggaggugaagcgggaagccugcccggggacgagcgucaucauugauggaaacugugacggccgcgguaaaucgacucgaucuaccacagauuccgggaaggugauacccgaguggugcuguagaucaugcacuaugccuccaguuaguuuucauggcagcgacggauguugguaccccauggaaaucaggccucggaaaacccacgagucccaucuggugcguucuugggucacagcuuga

SEQ ID NO: 2223 - RNA, 1197 nt, Artificial Sequence
  derived and/or modified CDS sequence (opt3) from YFV__NC_002031.1__NS1-Y (polyprotein: aa779-1177)
gaccaggguugcgcuauaaacuuuggcaagagagagcugaaauguggggauggaaucuucauuuuuagggacucagaugacugguugaauaaguacaguuauuaccccgaagauccugugaaauuagcaagcaucguaaaggccuccuucgaggaaggcaaaugcggucugaacucuguggacucgcuagagcacgaaauguggcggucacgcgcggaugagauuaaugcuaucuuugaggaaaacgaggucgacauaagcgugguugugcaagauccaaagaaugucuaucagcgagggacccauccguucagucguaucagagacggacuccaguacggcuggaagacauggggcaaaaaccugguguuuucccccgggaggaagaauggaucuuucauuaucgaugguaaaagccggaaggaauguccuuuuuccaaccgcguauggaacucauuccagauugaggaguuuggcacugggguuuucacgaccagaguguauauggacgccgucuuugaauacacaaucgauugcgacggaaguauacuuggcgcagccgugaaugguaaaaagagcgcucacgggucuccaacuuucuggaugggaucccaugaggugaauggcaccuggaugauucacacacuggaagcauuggacuauaaggagugugaauggccccucacccauacuaucggcacaucagucgaggagagcgaaauguucaugccuaggaguauugggggaccaguuucuucccacaaccacauccccgguuacaaagugcaaaccaauggcccuuggaugcagguaccacuggaggugaagcgggaagccugcccggggacgagcgucaucauugauggaaacugugacggccgcgguaaaucgacucgaucuaccacagauuccgggaaggugauacccgaguggugcuguagaucaugcacuaugccuccaguuaguuuucauggcagcgacggauguugguaccccauggaaaucaggccucggaaaacccacgagucccaucuggugcguucuugggucacagcuggcgagauucacgccgugccauucgggcucguaagcaugaugaucgcgauggaaguuguguuacgcaagagacagggacccaaacagaugcuggucgguggcgugguccuuuugggggcaaugcuggugggacaaguuacc

SEQ ID NO: 2224 - RNA, 1056 nt, Artificial Sequence
  derived and/or modified CDS sequence (opt3) from YFV__NC_002031.1__NS1 (polyprotein: aa779-1130)
gaccaggguugcgcuauaaacuuuggcaagagagagcugaaauguggggauggaaucuucauuuuuagggacucagaugacugguugaauaaguacaguuauuaccccgaagauccugugaaauuagcaagcaucguaaaggccuccuucgaggaaggcaaaugcggucugaacucuguggacucgcuagagcacgaaauguggcggucacgcgcggaugagauuaaugcuaucuuugaggaaaacgaggucgacauaagcgugguugugcaagauccaaagaaugucuaucagcgagggacccauccguucagucguaucagagacggacuccaguacggcuggaagacauggggcaaaaaccugguguuuucccccgggaggaagaauggaucuuucauuaucgaugguaaaagccggaaggaauguccuuuuuccaaccgcguauggaacucauuccagauugaggaguuuggcacugggguuuucacgaccagaguguauauggacgccgucuuugaauacacaaucgauugcgacggaaguauacuuggcgcagccgugaaugguaaaaagagcgcucacgggucuccaacuuucuggaugggaucccaugaggugaauggcaccuggaugauucacacacuggaagcauuggacuauaaggagugugaauggccccucacccauacuaucggcacaucagucgaggagagcgaaauguucaugccuaggaguauugggggaccaguuucuucccacaaccacauccccgguuacaaagugcaaaccaauggcccuuggaugcagguaccacuggaggugaagcgggaagccugcccggggacgagcgucaucauugauggaaacugugacggccgcgguaaaucgacucgaucuaccacagauuccgggaaggugauacccgaguggugcuguagaucaugcacuaugccuccaguuaguuuucauggcagcgacggauguugguaccccauggaaaucaggccucggaaaacccacgagucccaucuggugcguucuugggucacagcu

SEQ ID NO: 2225 - RNA, 1113 nt, Artificial Sequence
  derived and/or modified CDS sequence (opt3) from YFV__NC_002031.1__SSIgE-NS1 (polyprotein: aa779-1130)
auggacuggaccuggauccuguuccucguggccgcugcaacaagaguccacagcgaccaggguugcgcuauaaacuuuggcaagagagagcugaaauguggggauggaaucuucauuuuuagggacucagaugacugguugaauaaguacaguuauuaccccgaagauccugugaaauuagcaagcaucguaaaggccuccuucgaggaaggcaaaugcggucugaacucuguggacucgcuagagcacgaaauguggcggucacgcgcggaugagauuaaugcuaucuuugaggaaaacgaggucgacauaagcgugguugugcaagauccaaagaaugucuaucagcgagggacccauccguucagucguaucagagacggacuccaguacggcuggaagacauggggcaaaaaccugguguuuucccccgggaggaagaauggaucuuucauuaucgaugguaaaagccggaaggaauguccuuuuuccaaccgcguauggaacucauuccagauugaggaguuuggcacugggguuuucacgaccagaguguauauggacgccgucuuugaauacacaaucgauugcgacggaaguauacuuggcgcagccgugaaugguaaaaagagcgcucacgggucuccaacuuucuggaugggaucccaugaggugaauggcaccuggaugauucacacacuggaagcauuggacuauaaggagugugaauggccccucacccauacuaucggcacaucagucgaggagagcgaaauguucaugccuaggaguauugggggaccaguuucuucccacaaccacauccccgguuacaaagugcaaaccaauggcccuuggaugcagguaccacuggaggugaagcgggaagccugcccggggacgagcgucaucauugauggaaacugugacggccgcgguaaaucgacucgaucuaccacagauuccgggaaggugauacccgaguggugcuguagaucaugcacuaugccuccaguuaguuuucauggcagcgacggauguugguaccccauggaaaucaggccucggaaaacccacgagucccaucuggugcguucuugggucacagcuuga

SEQ ID NO: 2226 - RNA, 1263 nt, Artificial Sequence
  derived and/or modified CDS sequence (opt4) from YFV__NC_002031.1__eSS-NS1-Y (polyprotein: aa758-1177)
augagcaugagcaugauccuggugggcgugaucaugauguuccugagccugggcgugggcgccgaccagggcugcgccaucaacuucggcaagagagagcugaagugcggcgacggcaucuucaucuucagagacagcgacgacuggcugaacaaguacagcuacuaccccgaggaccccgugaagcuggccagcaucgugaaggccagcuucgaggagggcaagugcggccugaacagcguggacagccuggagcacgagauguggagaagcagagccgacgagaucaacgccaucuucgaggagaacgagguggacaucagcgugguggugcaggaccccaagaacguguaccagagaggcacccaccccuucagcagaaucagagacggccugcaguacggcuggaagaccuggggcaagaaccugguguucagccccggcagaaagaacggcagcuucaucaucgacggcaagagcagaaaggagugccccuucagcaacagaguguggaacagcuuccagaucgaggaguucggcaccggcguguucaccaccagaguguacauggacgccguguucgaguacaccaucgacugcgacggcagcauccugggcgccgccgugaacggcaagaagagcgcccacggcagccccaccuucuggaugggcagccacgaggugaacggcaccuggaugauccacacccuggaggcccuggacuacaaggagugcgaguggccccugacccacaccaucggcaccagcguggaggagagcgagauguucaugcccagaagcaucggcggccccgugagcagccacaaccacauccccggcuacaaggugcagaccaacggccccuggaugcaggugccccuggaggugaagagagaggccugccccggcaccagcgugaucaucgacggcaacugcgacggcagaggcaagagcaccagaagcaccaccgacagcggcaaggugauccccgaguggugcugcagaagcugcaccaugccccccgugagcuuccacggcagcgacggcugcugguaccccauggagaucagacccagaaagacccacgagagccaccuggugagaagcugggugaccgccggcgagauccacgccgugcccuucggccuggugagcaugaugaucgccauggagguggugcugagaaagagacagggccccaagcagaugcuggugggcggcguggugcugcugggcgccaugcuggugggccaggugaccuga

SEQ ID NO: 2227 - RNA, 1122 nt, Artificial Sequence
  derived and/or modified CDS sequence (opt4) from YFV__NC_002031.1__eSS-NS1 (polyprotein: aa758-1130)
augagcaugagcaugauccuggugggcgugaucaugauguuccugagccugggcgugggcgccgaccagggcugcgccaucaacuucggcaagagagagcugaagugcggcgacggcaucuucaucuucagagacagcgacgacuggcugaacaaguacagcuacuaccccgaggaccccgugaagcuggccagcaucgugaaggccagcuucgaggagggcaagugcggccugaacagcguggacagccuggagcacgagauguggagaagcagagccgacgagaucaacgccaucuucgaggagaacgagguggacaucagcgugguggugcaggaccccaagaacguguaccagagaggcacccaccccuucagcagaaucagagacggccugcaguacggcuggaagaccuggggcaagaaccugguguucagccccggcagaaagaacggcagcuucaucaucgacggcaagagcagaaaggagugccccuucagcaacagaguguggaacagcuuccagaucgaggaguucggcaccggcguguucaccaccagaguguacauggacgccguguucgaguacaccaucgacugcgacggcagcauccugggcgccgccgugaacggcaagaagagcgcccacggcagccccaccuucuggaugggcagccacgaggugaacggcaccuggaugauccacacccuggaggcccuggacuacaaggagugcgaguggccccugacccacaccaucggcaccagcguggaggagagcgagauguucaugcccagaagcaucggcggccccgugagcagccacaaccacauccccggcuacaaggugcagaccaacggccccuggaugcaggugccccuggaggugaagagagaggccugccccggcaccagcgugaucaucgacggcaacugcgacggcagaggcaagagcaccagaagcaccaccgacagcggcaaggugauccccgaguggugcugcagaagcugcaccaugccccccgugagcuuccacggcagcgacggcugcugguaccccauggagaucagacccagaaagacccacgagagccaccuggugagaagcugggugaccgccuga

SEQ ID NO: 2228 - RNA, 1197 nt, Artificial Sequence
  derived and/or modified CDS sequence (opt4) from YFV__NC_002031.1__NS1-Y (polyprotein: aa779-1177)
gaccagggcugcgccaucaacuucggcaagagagagcugaagugcggcgacggcaucuucaucuucagagacagcgacgacuggcugaacaaguacagcuacuaccccgaggaccccgugaagcuggccagcaucgugaaggccagcuucgaggagggcaagugcggccugaacagcguggacagccuggagcacgagauguggagaagcagagccgacgagaucaacgccaucuucgaggagaacgagguggacaucagcgugguggugcaggaccccaagaacguguaccagagaggcacccaccccuucagcagaaucagagacggccugcaguacggcuggaagaccuggggcaagaaccugguguucagccccggcagaaagaacggcagcuucaucaucgacggcaagagcagaaaggagugccccuucagcaacagaguguggaacagcuuccagaucgaggaguucggcaccggcguguucaccaccagaguguacauggacgccguguucgaguacaccaucgacugcgacggcagcauccugggcgccgccgugaacggcaagaagagcgcccacggcagccccaccuucuggaugggcagccacgaggugaacggcaccuggaugauccacacccuggaggcccuggacuacaaggagugcgaguggccccugacccacaccaucggcaccagcguggaggagagcgagauguucaugcccagaagcaucggcggccccgugagcagccacaaccacauccccggcuacaaggugcagaccaacggccccuggaugcaggugccccuggaggugaagagagaggccugccccggcaccagcgugaucaucgacggcaacugcgacggcagaggcaagagcaccagaagcaccaccgacagcggcaaggugauccccgaguggugcugcagaagcugcaccaugccccccgugagcuuccacggcagcgacggcugcugguaccccauggagaucagacccagaaagacccacgagagccaccuggugagaagcugggugaccgccggcgagauccacgccgugcccuucggccuggugagcaugaugaucgccauggagguggugcugagaaagagacagggccccaagcagaugcuggugggcggcguggugcugcugggcgccaugcuggugggccaggugacc

SEQ ID NO: 2229 - RNA, 1056 nt, Artificial Sequence
  derived and/or modified CDS sequence (opt4) from YFV__NC_002031.1__NS1 (polyprotein: aa779-1130)
gaccagggcugcgccaucaacuucggcaagagagagcugaagugcggcgacggcaucuucaucuucagagacagcgacgacuggcugaacaaguacagcuacuaccccgaggaccccgugaagcuggccagcaucgugaaggccagcuucgaggagggcaagugcggccugaacagcguggacagccuggagcacgagauguggagaagcagagccgacgagaucaacgccaucuucgaggagaacgagguggacaucagcgugguggugcaggaccccaagaacguguaccagagaggcacccaccccuucagcagaaucagagacggccugcaguacggcuggaagaccuggggcaagaaccugguguucagccccggcagaaagaacggcagcuucaucaucgacggcaagagcagaaaggagugccccuucagcaacagaguguggaacagcuuccagaucgaggaguucggcaccggcguguucaccaccagaguguacauggacgccguguucgaguacaccaucgacugcgacggcagcauccugggcgccgccgugaacggcaagaagagcgcccacggcagccccaccuucuggaugggcagccacgaggugaacggcaccuggaugauccacacccuggaggcccuggacuacaaggagugcgaguggccccugacccacaccaucggcaccagcguggaggagagcgagauguucaugcccagaagcaucggcggccccgugagcagccacaaccacauccccggcuacaaggugcagaccaacggccccuggaugcaggugccccuggaggugaagagagaggccugccccggcaccagcgugaucaucgacggcaacugcgacggcagaggcaagagcaccagaagcaccaccgacagcggcaaggugauccccgaguggugcugcagaagcugcaccaugccccccgugagcuuccacggcagcgacggcugcugguaccccauggagaucagacccagaaagacccacgagagccaccuggugagaagcugggugaccgcc

SEQ ID NO: 2230 - RNA, 1113 nt, Artificial Sequence
  derived and/or modified CDS sequence (opt4) from YFV__NC_002031.1__SSIgE-NS1 (polyprotein: aa779-1130)
auggacuggaccuggauccuguuccugguggccgccgccaccagagugcacagcgaccagggcugcgccaucaacuucggcaagagagagcugaagugcggcgacggcaucuucaucuucagagacagcgacgacuggcugaacaaguacagcuacuaccccgaggaccccgugaagcuggccagcaucgugaaggccagcuucgaggagggcaagugcggccugaacagcguggacagccuggagcacgagauguggagaagcagagccgacgagaucaacgccaucuucgaggagaacgagguggacaucagcgugguggugcaggaccccaagaacguguaccagagaggcacccaccccuucagcagaaucagagacggccugcaguacggcuggaagaccuggggcaagaaccugguguucagccccggcagaaagaacggcagcuucaucaucgacggcaagagcagaaaggagugccccuucagcaacagaguguggaacagcuuccagaucgaggaguucggcaccggcguguucaccaccagaguguacauggacgccguguucgaguacaccaucgacugcgacggcagcauccugggcgccgccgugaacggcaagaagagcgcccacggcagccccaccuucuggaugggcagccacgaggugaacggcaccuggaugauccacacccuggaggcccuggacuacaaggagugcgaguggccccugacccacaccaucggcaccagcguggaggagagcgagauguucaugcccagaagcaucggcggccccgugagcagccacaaccacauccccggcuacaaggugcagaccaacggccccuggaugcaggugccccuggaggugaagagagaggccugccccggcaccagcgugaucaucgacggcaacugcgacggcagaggcaagagcaccagaagcaccaccgacagcggcaaggugauccccgaguggugcugcagaagcugcaccaugccccccgugagcuuccacggcagcgacggcugcugguaccccauggagaucagacccagaaagacccacgagagccaccuggugagaagcugggugaccgccuga

SEQ ID NO: 2231 - RNA, 1263 nt, Artificial Sequence
  derived and/or modified CDS sequence (opt5) from YFV__NC_002031.1__eSS-NS1-Y (polyprotein: aa758-1177)
augagcauguccaugauccuggugggcgucauuaugauguuccucucucuggggguuggagccgaccagggcugcgcuaucaacuuugggaagagagagcuuaaauguggagauggcauuuucaucuuucgggacagcgaugacuggcugaauaaguacuccuauuaccccgaagauccugugaaacucgccucuauugugaaggcgagcuucgaggaagggaaaugcggacugaacuccgucgacucucuugagcacgaaauguggcgcagcagagcugaugagaucaaugccaucuuugaggaaaacgagguggacauuuccguugugguccaagauccgaagaauguguaucagcggggcacccaucccuucagccgcaucagagacggccugcaguacggguggaagacauggggcaaaaaccucguguuuucuccuggacggaagaauggguccuucauuaucgauggaaaaagccgcaaggaaugucccuuuucuaacagaguguggaacuccuuccagauugaggaguuuggcacgggggucuucaccacacggguguauauggacgccguguuugaauacaccaucgauugcgacggaagcauucugggcgcugccgucaauggcaaaaagucugcucacggguccccuacauucuggaugggaagccaugagguuaauggcaccuggaugauccacacacuggaagcccucgacuauaaggagugugaauggccccugacccauacgaucgggaccuccguggaggagucugaaauguucaugccucgcagcauuggaggcccgguguccagccacaaccacauccccggguacaaaguccaaacaaauggaccuuggaugcagguuccccuugagguuaagagagaagcgugcccuggcaccucugugauuaucgauggcaacugugacgggcggggaaaauccacacgcagcaccacggauucuggcaaggucauucccgaguggugcuguagaagcugcacaaugccgccuguguccuuucaugggucugacggauguugguaccccauggaaauccggccucgcaaaacccacgagagccaucugguuagauccugggugacagccggcgagauccacgcuguccccuucgggcucgugagcaugaugauugccauggaagucgugcugcggaagagacagggccccaaacagaugcuuguuggaggcgugguccugcucggggcuaugcuggugggacaaguuaccuga

SEQ ID NO: 2232 - RNA, 1122 nt, Artificial Sequence
  derived and/or modified CDS sequence (opt5) from YFV__NC_002031.1__eSS-NS1 (polyprotein: aa758-1130)
augagcauguccaugauccuggugggcgucauuaugauguuccucucucuggggguuggagccgaccagggcugcgcuaucaacuuugggaagagagagcuuaaauguggagauggcauuuucaucuuucgggacagcgaugacuggcugaauaaguacuccuauuaccccgaagauccugugaaacucgccucuauugugaaggcgagcuucgaggaagggaaaugcggacugaacuccgucgacucucuugagcacgaaauguggcgcagcagagcugaugagaucaaugccaucuuugaggaaaacgagguggacauuuccguugugguccaagauccgaagaauguguaucagcggggcacccaucccuucagccgcaucagagacggccugcaguacggguggaagacauggggcaaaaaccucguguuuucuccuggacggaagaauggguccuucauuaucgauggaaaaagccgcaaggaaugucccuuuucuaacagaguguggaacuccuuccagauugaggaguuuggcacgggggucuucaccacacggguguauauggacgccguguuugaauacaccaucgauugcgacggaagcauucugggcgcugccgucaauggcaaaaagucugcucacggguccccuacauucuggaugggaagccaugagguuaauggcaccuggaugauccacacacuggaagcccucgacuauaaggagugugaauggccccugacccauacgaucgggaccuccguggaggagucugaaauguucaugccucgcagcauuggaggcccgguguccagccacaaccacauccccggguacaaaguccaaacaaauggaccuuggaugcagguuccccuugagguuaagagagaagcgugcccuggcaccucugugauuaucgauggcaacugugacgggcggggaaaauccacacgcagcaccacggauucuggcaaggucauucccgaguggugcuguagaagcugcacaaugccgccuguguccuuucaugggucugacggauguugguaccccauggaaauccggccucgcaaaacccacgagagccaucugguuagauccugggugacagccuga

SEQ ID NO: 2233 - RNA, 1197 nt, Artificial Sequence
  derived and/or modified CDS sequence (opt5) from YFV__NC_002031.1__NS1-Y (polyprotein: aa779-1177)
gaccagggcugcgcuaucaacuuugggaagagagagcuuaaauguggagauggcauuuucaucuuucgggacagcgaugacuggcugaauaaguacuccuauuaccccgaagauccugugaaacucgccucuauugugaaggcgagcuucgaggaagggaaaugcggacugaacuccgucgacucucuugagcacgaaauguggcgcagcagagcugaugagaucaaugccaucuuugaggaaaacgagguggacauuuccguugugguccaagauccgaagaauguguaucagcggggcacccaucccuucagccgcaucagagacggccugcaguacggguggaagacauggggcaaaaaccucguguuuucuccuggacggaagaauggguccuucauuaucgauggaaaaagccgcaaggaaugucccuuuucuaacagaguguggaacuccuuccagauugaggaguuuggcacgggggucuucaccacacggguguauauggacgccguguuugaauacaccaucgauugcgacggaagcauucugggcgcugccgucaauggcaaaaagucugcucacggguccccuacauucuggaugggaagccaugagguuaauggcaccuggaugauccacacacuggaagcccucgacuauaaggagugugaauggccccugacccauacgaucgggaccuccguggaggagucugaaauguucaugccucgcagcauuggaggcccgguguccagccacaaccacauccccggguacaaaguccaaacaaauggaccuuggaugcagguuccccuugagguuaagagagaagcgugcccuggcaccucugugauuaucgauggcaacugugacgggcggggaaaauccacacgcagcaccacggauucuggcaaggucauucccgaguggugcuguagaagcugcacaaugccgccuguguccuuucaugggucugacggauguugguaccccauggaaauccggccucgcaaaacccacgagagccaucugguuagauccugggugacagccggcgagauccacgcuguccccuucgggcucgugagcaugaugauugccauggaagucgugcugcggaagagacagggccccaaacagaugcuuguuggaggcgugguccugcucggggcuaugcuggugggacaaguuacc

SEQ ID NO: 2234 - RNA, 1056 nt, Artificial Sequence
  derived and/or modified CDS sequence (opt5) from YFV__NC_002031.1__NS1 (polyprotein: aa779-1130)
gaccagggcugcgcuaucaacuuugggaagagagagcuuaaauguggagauggcauuuucaucuuucgggacagcgaugacuggcugaauaaguacuccuauuaccccgaagauccugugaaacucgccucuauugugaaggcgagcuucgaggaagggaaaugcggacugaacuccgucgacucucuugagcacgaaauguggcgcagcagagcugaugagaucaaugccaucuuugaggaaaacgagguggacauuuccguugugguccaagauccgaagaauguguaucagcggggcacccaucccuucagccgcaucagagacggccugcaguacggguggaagacauggggcaaaaaccucguguuuucuccuggacggaagaauggguccuucauuaucgauggaaaaagccgcaaggaaugucccuuuucuaacagaguguggaacuccuuccagauugaggaguuuggcacgggggucuucaccacacggguguauauggacgccguguuugaauacaccaucgauugcgacggaagcauucugggcgcugccgucaauggcaaaaagucugcucacggguccccuacauucuggaugggaagccaugagguuaauggcaccuggaugauccacacacuggaagcccucgacuauaaggagugugaauggccccugacccauacgaucgggaccuccguggaggagucugaaauguucaugccucgcagcauuggaggcccgguguccagccacaaccacauccccggguacaaaguccaaacaaauggaccuuggaugcagguuccccuugagguuaagagagaagcgugcccuggcaccucugugauuaucgauggcaacugugacgggcggggaaaauccacacgcagcaccacggauucuggcaaggucauucccgaguggugcuguagaagcugcacaaugccgccuguguccuuucaugggucugacggauguugguaccccauggaaauccggccucgcaaaacccacgagagccaucugguuagauccugggugacagcc

SEQ ID NO: 2235 - RNA, 1113 nt, Artificial Sequence
  derived and/or modified CDS sequence (opt5) from YFV__NC_002031.1__SSIgE-NS1 (polyprotein: aa779-1130)
auggacuggaccuggauccuguuccucguggccgcugccacaagaguccacagcgaccagggcugcgcuaucaacuuugggaagagagagcuuaaauguggagauggcauuuucaucuuucgggacagcgaugacuggcugaauaaguacuccuauuaccccgaagauccugugaaacucgccucuauugugaaggcgagcuucgaggaagggaaaugcggacugaacuccgucgacucucuugagcacgaaauguggcgcagcagagcugaugagaucaaugccaucuuugaggaaaacgagguggacauuuccguugugguccaagauccgaagaauguguaucagcggggcacccaucccuucagccgcaucagagacggccugcaguacggguggaagacauggggcaaaaaccucguguuuucuccuggacggaagaauggguccuucauuaucgauggaaaaagccgcaaggaaugucccuuuucuaacagaguguggaacuccuuccagauugaggaguuuggcacgggggucuucaccacacggguguauauggacgccguguuugaauacaccaucgauugcgacggaagcauucugggcgcugccgucaauggcaaaaagucugcucacggguccccuacauucuggaugggaagccaugagguuaauggcaccuggaugauccacacacuggaagcccucgacuauaaggagugugaauggccccugacccauacgaucgggaccuccguggaggagucugaaauguucaugccucgcagcauuggaggcccgguguccagccacaaccacauccccggguacaaaguccaaacaaauggaccuuggaugcagguuccccuugagguuaagagagaagcgugcccuggcaccucugugauuaucgauggcaacugugacgggcggggaaaauccacacgcagcaccacggauucuggcaaggucauucccgaguggugcuguagaagcugcacaaugccgccuguguccuuucaugggucugacggauguugguaccccauggaaauccggccucgcaaaacccacgagagccaucugguuagauccugggugacagccuga

SEQ ID NO: 2236 - RNA, 1263 nt, Artificial Sequence
  derived and/or modified CDS sequence (opt6) from YFV__NC_002031.1__eSS-NS1-Y (polyprotein: aa758-1177)
augucaaugaguaugauauuaguagggguaauaaugauguuccuuagcuuaggaguaggagcagaucaaggaugugcaauaaauuuuggaaaaagagaacuaaaaugcggagacgguauauuuauauuuagagauagugaugauuggcuaaauaaauauaguuacuauccagaagauccaguuaaauuagccucaauaguaaaagcuagcuuugaagaaggaaaauguggacuaaauucaguagacagucuagaacacgaaauguggagaucaagggcagaugaaauaaaugcaaucuuugaagaaaaugaaguggauauaucagugguaguacaagauccaaaaaauguguaccaaagaggaacacauccauuuaguaggauaagagauggauuacaauauggauggaaaacauggggaaaaaauuuaguauuuaguccaggaagaaaaaauggaucauuuauaauagaugggaaaagccgaaaagaauguccauuuucaaacagaguauggaacucauuucaaauugaagaauuuggaacaggaguauuuacaacaagaguauauauggaugcaguauuugaauacaccauagauugugauggaaguauauuaggagcagcaguaaaugggaaaaaaagcgcucacggaaguccaacguuuuggaugggaucacacgagguaaauggcacguggaugauacauacuuuagaagcauuagauuacaaagaaugugaauggccauuaacucauacaauagguacaagcguagaagaaagugagauguuuaugccacguucaaucggggggccaguaucaagucauaaccauauaccaggauauaaaguacaaacgaauggaccuuggaugcaaguaccacuagaaguaaaacgagaagcaugcccaggaacgucaguaauaauagauggaaauugugauggcagggguaaaagcacaagaucaacaacagauucaggaaaaguaauaccugaaugguguuguagaaguuguacaaugccaccaguaucauuccauggaagugauggaugcugguauccaauggaaauuagaccaagaaaaacucaugaaagucauuuaguaagaucuuggguaacugcaggagaaauacaugcaguaccauuugguuuaguaaguaugaugauagcaauggaaguaguucuaagaaaaaggcaagggccuaaacaaaugcuagugggaggaguaguauugcuaggugcaauguuaguaggccaaguaaccuga

SEQ ID NO: 2237 - RNA, 1122 nt, Artificial Sequence
  derived and/or modified CDS sequence (opt6) from YFV__NC_002031.1__eSS-NS1 (polyprotein: aa758-1130)
augucaaugaguaugauauuaguagggguaauaaugauguuccuuagcuuaggaguaggagcagaucaaggaugugcaauaaauuuuggaaaaagagaacuaaaaugcggagacgguauauuuauauuuagagauagugaugauuggcuaaauaaauauaguuacuauccagaagauccaguuaaauuagccucaauaguaaaagcuagcuuugaagaaggaaaauguggacuaaauucaguagacagucuagaacacgaaauguggagaucaagggcagaugaaauaaaugcaaucuuugaagaaaaugaaguggauauaucagugguaguacaagauccaaaaaauguguaccaaagaggaacacauccauuuaguaggauaagagauggauuacaauauggauggaaaacauggggaaaaaauuuaguauuuaguccaggaagaaaaaauggaucauuuauaauagaugggaaaagccgaaaagaauguccauuuucaaacagaguauggaacucauuucaaauugaagaauuuggaacaggaguauuuacaacaagaguauauauggaugcaguauuugaauacaccauagauugugauggaaguauauuaggagcagcaguaaaugggaaaaaaagcgcucacggaaguccaacguuuuggaugggaucacacgagguaaauggcacguggaugauacauacuuuagaagcauuagauuacaaagaaugugaauggccauuaacucauacaauagguacaagcguagaagaaagugagauguuuaugccacguucaaucggggggccaguaucaagucauaaccauauaccaggauauaaaguacaaacgaauggaccuuggaugcaaguaccacuagaaguaaaacgagaagcaugcccaggaacgucaguaauaauagauggaaauugugauggcagggguaaaagcacaagaucaacaacagauucaggaaaaguaauaccugaaugguguuguagaaguuguacaaugccaccaguaucauuccauggaagugauggaugcugguauccaauggaaauuagaccaagaaaaacucaugaaagucauuuaguaagaucuuggguaacugcauga

SEQ ID NO: 2238 - RNA, 1197 nt, Artificial Sequence
  derived and/or modified CDS sequence (opt6) from YFV__NC_002031.1__NS1-Y (polyprotein: aa779-1177)
gaucaaggaugugcaauaaauuuuggaaaaagagaacuaaaaugcggagacgguauauuuauauuuagagauagugaugauuggcuaaauaaauauaguuacuauccagaagauccaguuaaauuagccucaauaguaaaagcuagcuuugaagaaggaaaauguggacuaaauucaguagacagucuagaacacgaaauguggagaucaagggcagaugaaauaaaugcaaucuuugaagaaaaugaaguggauauaucagugguaguacaagauccaaaaaauguguaccaaagaggaacacauccauuuaguaggauaagagauggauuacaauauggauggaaaacauggggaaaaaauuuaguauuuaguccaggaagaaaaaauggaucauuuauaauagaugggaaaagccgaaaagaauguccauuuucaaacagaguauggaacucauuucaaauugaagaauuuggaacaggaguauuuacaacaagaguauauauggaugcaguauuugaauacaccauagauugugauggaaguauauuaggagcagcaguaaaugggaaaaaaagcgcucacggaaguccaacguuuuggaugggaucacacgagguaaauggcacguggaugauacauacuuuagaagcauuagauuacaaagaaugugaauggccauuaacucauacaauagguacaagcguagaagaaagugagauguuuaugccacguucaaucggggggccaguaucaagucauaaccauauaccaggauauaaaguacaaacgaauggaccuuggaugcaaguaccacuagaaguaaaacgagaagcaugcccaggaacgucaguaauaauagauggaaauugugauggcagggguaaaagcacaagaucaacaacagauucaggaaaaguaauaccugaaugguguuguagaaguuguacaaugccaccaguaucauuccauggaagugauggaugcugguauccaauggaaauuagaccaagaaaaacucaugaaagucauuuaguaagaucuuggguaacugcaggagaaauacaugcaguaccauuugguuuaguaaguaugaugauagcaauggaaguaguucuaagaaaaaggcaagggccuaaacaaaugcuagugggaggaguaguauugcuaggugcaauguuaguaggccaaguaacc

SEQ ID NO: 2239 - RNA, 1056 nt, Artificial Sequence
  derived and/or modified CDS sequence (opt6) from YFV__NC_002031.1__NS1 (polyprotein: aa779-1130)
gaucaaggaugugcaauaaauuuuggaaaaagagaacuaaaaugcggagacgguauauuuauauuuagagauagugaugauuggcuaaauaaauauaguuacuauccagaagauccaguuaaauuagccucaauaguaaaagcuagcuuugaagaaggaaaauguggacuaaauucaguagacagucuagaacacgaaauguggagaucaagggcagaugaaauaaaugcaaucuuugaagaaaaugaaguggauauaucagugguaguacaagauccaaaaaauguguaccaaagaggaacacauccauuuaguaggauaagagauggauuacaauauggauggaaaacauggggaaaaaauuuaguauuuaguccaggaagaaaaaauggaucauuuauaauagaugggaaaagccgaaaagaauguccauuuucaaacagaguauggaacucauuucaaauugaagaauuuggaacaggaguauuuacaacaagaguauauauggaugcaguauuugaauacaccauagauugugauggaaguauauuaggagcagcaguaaaugggaaaaaaagcgcucacggaaguccaacguuuuggaugggaucacacgagguaaauggcacguggaugauacauacuuuagaagcauuagauuacaaagaaugugaauggccauuaacucauacaauagguacaagcguagaagaaagugagauguuuaugccacguucaaucggggggccaguaucaagucauaaccauauaccaggauauaaaguacaaacgaauggaccuuggaugcaaguaccacuagaaguaaaacgagaagcaugcccaggaacgucaguaauaauagauggaaauugugauggcagggguaaaagcacaagaucaacaacagauucaggaaaaguaauaccugaaugguguuguagaaguuguacaaugccaccaguaucauuccauggaagugauggaugcugguauccaauggaaauuagaccaagaaaaacucaugaaagucauuuaguaagaucuuggguaacugca

SEQ ID NO: 2240 - RNA, 1113 nt, Artificial Sequence
  derived and/or modified CDS sequence (opt6) from YFV__NC_002031.1__SSIgE-NS1 (polyprotein: aa779-1130)
auggacuggacauggauauuauuuuuaguagcagcagcaacaagaguacauucagaucaaggaugugcaauaaauuuuggaaaaagagaacuaaaaugcggagacgguauauuuauauuuagagauagugaugauuggcuaaauaaauauaguuacuauccagaagauccaguuaaauuagccucaauaguaaaagcuagcuuugaagaaggaaaauguggacuaaauucaguagacagucuagaacacgaaauguggagaucaagggcagaugaaauaaaugcaaucuuugaagaaaaugaaguggauauaucagugguaguacaagauccaaaaaauguguaccaaagaggaacacauccauuuaguaggauaagagauggauuacaauauggauggaaaacauggggaaaaaauuuaguauuuaguccaggaagaaaaaauggaucauuuauaauagaugggaaaagccgaaaagaauguccauuuucaaacagaguauggaacucauuucaaauugaagaauuuggaacaggaguauuuacaacaagaguauauauggaugcaguauuugaauacaccauagauugugauggaaguauauuaggagcagcaguaaaugggaaaaaaagcgcucacggaaguccaacguuuuggaugggaucacacgagguaaauggcacguggaugauacauacuuuagaagcauuagauuacaaagaaugugaauggccauuaacucauacaauagguacaagcguagaagaaagugagauguuuaugccacguucaaucggggggccaguaucaagucauaaccauauaccaggauauaaaguacaaacgaauggaccuuggaugcaaguaccacuagaaguaaaacgagaagcaugcccaggaacgucaguaauaauagauggaaauugugauggcagggguaaaagcacaagaucaacaacagauucaggaaaaguaauaccugaaugguguuguagaaguuguacaaugccaccaguaucauuccauggaagugauggaugcugguauccaauggaaauuagaccaagaaaaacucaugaaagucauuuaguaagaucuuggguaacugcauga

SEQ ID NO: 2241 - RNA, 1263 nt, Artificial Sequence
  derived and/or modified CDS sequence (opt11) from YFV__NC_002031.1__eSS-NS1-Y (polyprotein: aa758-1177)
augagcaugagcaugaucuugguaggggucauaaugauguucuugagccuagggguaggcgcagaccagggaugcgcgauaaacuucggcaaacgcgaacucaaaugcggggacggaaucuucaucuuucgcgacagugacgacuggcuaaacaaguacaguuacuacccggaagaccccguaaaacuagccucaauaguaaaagcgagcuucgaagaaggaaagugcgggcuaaacagcguggacucccuagagcacgagauguggaggucgagagcggacgagaucaacgccauauucgaagaaaaugaaguagacauaagcguagucguacaagaucccaaaaacguguaccagcgcggaacccaccccuucagcaggaucagagacgggcuacaauacggauggaagacauggggcaaaaaccuggucuucagcccgggcaggaaaaacggaucguucaucaucgauggcaaaagccgaaaggagugcccguucucaaacaggguauggaacucguuccagaucgaagaguucggcacaggcgucuucacgacaagagucuacauggacgcaguguucgaauacacaaucgacugcgacggcuccauacugggcgcagccgugaacgggaaaaagagcgcacacggaagcccgaccuuuuggauggguucgcacgaggugaacggaacauggaugauacacaccuuagaagcacucgauuacaaagaaugcgaauggcccuuaacccacaccaucgguacguccguagaagaaagcgaaauguucaugccgcgcucaaucggcggcccagucucgagccacaaccacaucccgggcuauaaaguacaaacaaacgggccauggaugcagguaccccucgaggucaagcgcgaagccugccccggaaccucggucaucaucgacggcaacugcgacggcaggggaaaaagcacgcgcucaaccacggacucgggaaagguaauaccagaguggugcugcaggagcugcaccaugccaccgguaucguuccacggcucagacggaugcugguacccgauggaaaucagacccagaaaaacgcacgagagccaccucguacgcucauggguaaccgcaggcgagauccacgccgugccauuuggacuggucucaaugaugauagcgauggaggucgugcucaggaagaggcaagggcccaagcaaaugcucguaggaggaguaguacuccugggcgcaaugcuggucggacaggugaccuga

SEQ ID NO: 2242 - RNA, 1122 nt, Artificial Sequence
  derived and/or modified CDS sequence (opt11) from YFV__NC_002031.1__eSS-NS1 (polyprotein: aa758-1130)
augagcaugagcaugaucuugguaggggucauaaugauguucuugagccuagggguaggcgcagaccagggaugcgcgauaaacuucggcaaacgcgaacucaaaugcggggacggaaucuucaucuuucgcgacagugacgacuggcuaaacaaguacaguuacuacccggaagaccccguaaaacuagccucaauaguaaaagcgagcuucgaagaaggaaagugcgggcuaaacagcguggacucccuagagcacgagauguggaggucgagagcggacgagaucaacgccauauucgaagaaaaugaaguagacauaagcguagucguacaagaucccaaaaacguguaccagcgcggaacccaccccuucagcaggaucagagacgggcuacaauacggauggaagacauggggcaaaaaccuggucuucagcccgggcaggaaaaacggaucguucaucaucgauggcaaaagccgaaaggagugcccguucucaaacaggguauggaacucguuccagaucgaagaguucggcacaggcgucuucacgacaagagucuacauggacgcaguguucgaauacacaaucgacugcgacggcuccauacugggcgcagccgugaacgggaaaaagagcgcacacggaagcccgaccuuuuggauggguucgcacgaggugaacggaacauggaugauacacaccuuagaagcacucgauuacaaagaaugcgaauggcccuuaacccacaccaucgguacguccguagaagaaagcgaaauguucaugccgcgcucaaucggcggcccagucucgagccacaaccacaucccgggcuauaaaguacaaacaaacgggccauggaugcagguaccccucgaggucaagcgcgaagccugccccggaaccucggucaucaucgacggcaacugcgacggcaggggaaaaagcacgcgcucaaccacggacucgggaaagguaauaccagaguggugcugcaggagcugcaccaugccaccgguaucguuccacggcucagacggaugcugguacccgauggaaaucagacccagaaaaacgcacgagagccaccucguacgcucauggguaaccgcauga

SEQ ID NO: 2243 - RNA, 1197 nt, Artificial Sequence
  derived and/or modified CDS sequence (opt11) from YFV__NC_002031.1__NS1-Y (polyprotein: aa779-1177)
gaccagggaugcgcgauaaacuucggcaaacgcgaacucaaaugcggggacggaaucuucaucuuucgcgacagugacgacuggcuaaacaaguacaguuacuacccggaagaccccguaaaacuagccucaauaguaaaagcgagcuucgaagaaggaaagugcgggcuaaacagcguggacucccuagagcacgagauguggaggucgagagcggacgagaucaacgccauauucgaagaaaaugaaguagacauaagcguagucguacaagaucccaaaaacguguaccagcgcggaacccaccccuucagcaggaucagagacgggcuacaauacggauggaagacauggggcaaaaaccuggucuucagcccgggcaggaaaaacggaucguucaucaucgauggcaaaagccgaaaggagugcccguucucaaacaggguauggaacucguuccagaucgaagaguucggcacaggcgucuucacgacaagagucuacauggacgcaguguucgaauacacaaucgacugcgacggcuccauacugggcgcagccgugaacgggaaaaagagcgcacacggaagcccgaccuuuuggauggguucgcacgaggugaacggaacauggaugauacacaccuuagaagcacucgauuacaaagaaugcgaauggcccuuaacccacaccaucgguacguccguagaagaaagcgaaauguucaugccgcgcucaaucggcggcccagucucgagccacaaccacaucccgggcuauaaaguacaaacaaacgggccauggaugcagguaccccucgaggucaagcgcgaagccugccccggaaccucggucaucaucgacggcaacugcgacggcaggggaaaaagcacgcgcucaaccacggacucgggaaagguaauaccagaguggugcugcaggagcugcaccaugccaccgguaucguuccacggcucagacggaugcugguacccgauggaaaucagacccagaaaaacgcacgagagccaccucguacgcucauggguaaccgcaggcgagauccacgccgugccauuuggacuggucucaaugaugauagcgauggaggucgugcucaggaagaggcaagggcccaagcaaaugcucguaggaggaguaguacuccugggcgcaaugcuggucggacaggugacc

SEQ ID NO: 2244 - RNA, 1056 nt, Artificial Sequence
  derived and/or modified CDS sequence (opt11) from YFV__NC_002031.1__NS1 (polyprotein: aa779-1130)
gaccagggaugcgcgauaaacuucggcaaacgcgaacucaaaugcggggacggaaucuucaucuuucgcgacagugacgacuggcuaaacaaguacaguuacuacccggaagaccccguaaaacuagccucaauaguaaaagcgagcuucgaagaaggaaagugcgggcuaaacagcguggacucccuagagcacgagauguggaggucgagagcggacgagaucaacgccauauucgaagaaaaugaaguagacauaagcguagucguacaagaucccaaaaacguguaccagcgcggaacccaccccuucagcaggaucagagacgggcuacaauacggauggaagacauggggcaaaaaccuggucuucagcccgggcaggaaaaacggaucguucaucaucgauggcaaaagccgaaaggagugcccguucucaaacaggguauggaacucguuccagaucgaagaguucggcacaggcgucuucacgacaagagucuacauggacgcaguguucgaauacacaaucgacugcgacggcuccauacugggcgcagccgugaacgggaaaaagagcgcacacggaagcccgaccuuuuggauggguucgcacgaggugaacggaacauggaugauacacaccuuagaagcacucgauuacaaagaaugcgaauggcccuuaacccacaccaucgguacguccguagaagaaagcgaaauguucaugccgcgcucaaucggcggcccagucucgagccacaaccacaucccgggcuauaaaguacaaacaaacgggccauggaugcagguaccccucgaggucaagcgcgaagccugccccggaaccucggucaucaucgacggcaacugcgacggcaggggaaaaagcacgcgcucaaccacggacucgggaaagguaauaccagaguggugcugcaggagcugcaccaugccaccgguaucguuccacggcucagacggaugcugguacccgauggaaaucagacccagaaaaacgcacgagagccaccucguacgcucauggguaaccgca

SEQ ID NO: 2245 - RNA, 1113 nt, Artificial Sequence
  derived and/or modified CDS sequence (opt11) from YFV__NC_002031.1__SSIgE-NS1 (polyprotein: aa779-1130)
auggauuggacguggauacucuuucucguggccgcggccacgcgcgugcacucggaccagggaugcgcgauaaacuucggcaaacgcgaacucaaaugcggggacggaaucuucaucuuucgcgacagugacgacuggcuaaacaaguacaguuacuacccggaagaccccguaaaacuagccucaauaguaaaagcgagcuucgaagaaggaaagugcgggcuaaacagcguggacucccuagagcacgagauguggaggucgagagcggacgagaucaacgccauauucgaagaaaaugaaguagacauaagcguagucguacaagaucccaaaaacguguaccagcgcggaacccaccccuucagcaggaucagagacgggcuacaauacggauggaagacauggggcaaaaaccuggucuucagcccgggcaggaaaaacggaucguucaucaucgauggcaaaagccgaaaggagugcccguucucaaacaggguauggaacucguuccagaucgaagaguucggcacaggcgucuucacgacaagagucuacauggacgcaguguucgaauacacaaucgacugcgacggcuccauacugggcgcagccgugaacgggaaaaagagcgcacacggaagcccgaccuuuuggauggguucgcacgaggugaacggaacauggaugauacacaccuuagaagcacucgauuacaaagaaugcgaauggcccuuaacccacaccaucgguacguccguagaagaaagcgaaauguucaugccgcgcucaaucggcggcccagucucgagccacaaccacaucccgggcuauaaaguacaaacaaacgggccauggaugcagguaccccucgaggucaagcgcgaagccugccccggaaccucggucaucaucgacggcaacugcgacggcaggggaaaaagcacgcgcucaaccacggacucgggaaagguaauaccagaguggugcugcaggagcugcaccaugccaccgguaucguuccacggcucagacggaugcugguacccgauggaaaucagacccagaaaaacgcacgagagccaccucguacgcucauggguaaccgcauga

SEQ ID NO: 2246 - RNA, 1539 nt, Artificial Sequence
  mRNA product Design a-1 comprising derived and/or modified sequence from YFV__NC_002031.1__eSS-NS1-Y (polyprotein: aa758-1177) (wt)
gggagagucccgcagucggcguccagcggcucugcuuguucgugugugugucguugcaggccuuauucaagcuuaccauguccaugagcaugaucuugguaggagugaucaugauguuuuugucucuaggaguuggggcggaucaaggaugcgccaucaacuuuggcaagagagagcucaagugcggagaugguaucuucauauuuagagacucugaugacuggcugaacaaguacucauacuauccagaagauccugugaagcuugcaucaauagugaaagccucuuuugaagaagggaaguguggccuaaauucaguugacucccuugagcaugagauguggagaagcagggcagaugagaucaaugccauuuuugaggaaaacgagguggacauuucuguugucgugcaggauccaaagaauguuuaccagagaggaacucauccauuuuccagaauucgggauggucugcaguaugguuggaagacuugggguaagaaccuuguguucuccccagggaggaagaauggaagcuucaucauagauggaaaguccaggaaagaaugcccguuuucaaaccgggucuggaauucuuuccagauagaggaguuugggacgggaguguucaccacacgcguguacauggacgcagucuuugaauacaccauagacugcgauggaucuaucuugggugcagcggugaacggaaaaaagagugcccauggcucuccaacauuuuggaugggaagucaugaaguaaaugggacauggaugauccacaccuuggaggcauuagauuacaaggagugugaguggccacugacacauacgauuggaacaucaguugaagagagugaaauguucaugccgagaucaaucggaggcccaguuagcucucacaaucauaucccuggauacaagguucagacgaacggaccuuggaugcagguaccacuagaagugaagagagaagcuugcccagggacuagcgugaucauugauggcaacugugauggacggggaaaaucaaccagauccaccacggauagcgggaaaguuauuccugaaugguguugccgcuccugcacaaugccgccugugagcuuccaugguagugauggguguugguaucccauggaaauuaggccaaggaaaacgcaugaaagccaucuggugcgcuccuggguuacagcuggagaaauacaugcugucccuuuugguuuggugagcaugaugauagcaauggaagugguccuaaggaaaagacagggaccaaagcaaauguugguuggaggaguagugcucuugggagcaaugcuggucgggcaaguaacuugaggacuagucccuguucccagagcccacuuuuuuuucuuuuuuugaaauaaaauagccugucuuucagaucuaaaaaaaaaaaaaaaaaaaaaaaaaaaaaaaaaaaaaaaaaaaaaaaaaaaaaaaaaaaaaaaaugcaucccccccccccccccccccccccccccccccaaaggcucuuuucagagccaccagaauu

SEQ ID NO: 2247 - RNA, 1398 nt, Artificial Sequence
  mRNA product Design a-1 comprising derived and/or modified sequence from YFV__NC_002031.1__eSS-NS1 (polyprotein: aa758-1130) (wt)
gggagagucccgcagucggcguccagcggcucugcuuguucgugugugugucguugcaggccuuauucaagcuuaccauguccaugagcaugaucuugguaggagugaucaugauguuuuugucucuaggaguuggggcggaucaaggaugcgccaucaacuuuggcaagagagagcucaagugcggagaugguaucuucauauuuagagacucugaugacuggcugaacaaguacucauacuauccagaagauccugugaagcuugcaucaauagugaaagccucuuuugaagaagggaaguguggccuaaauucaguugacucccuugagcaugagauguggagaagcagggcagaugagaucaaugccauuuuugaggaaaacgagguggacauuucuguugucgugcaggauccaaagaauguuuaccagagaggaacucauccauuuuccagaauucgggauggucugcaguaugguuggaagacuugggguaagaaccuuguguucuccccagggaggaagaauggaagcuucaucauagauggaaaguccaggaaagaaugcccguuuucaaaccgggucuggaauucuuuccagauagaggaguuugggacgggaguguucaccacacgcguguacauggacgcagucuuugaauacaccauagacugcgauggaucuaucuugggugcagcggugaacggaaaaaagagugcccauggcucuccaacauuuuggaugggaagucaugaaguaaaugggacauggaugauccacaccuuggaggcauuagauuacaaggagugugaguggccacugacacauacgauuggaacaucaguugaagagagugaaauguucaugccgagaucaaucggaggcccaguuagcucucacaaucauaucccuggauacaagguucagacgaacggaccuuggaugcagguaccacuagaagugaagagagaagcuugcccagggacuagcgugaucauugauggcaacugugauggacggggaaaaucaaccagauccaccacggauagcgggaaaguuauuccugaaugguguugccgcuccugcacaaugccgccugugagcuuccaugguagugauggguguugguaucccauggaaauuaggccaaggaaaacgcaugaaagccaucuggugcgcuccuggguuacagcuugaggacuagucccuguucccagagcccacuuuuuuuucuuuuuuugaaauaaaauagccugucuuucagaucuaaaaaaaaaaaaaaaaaaaaaaaaaaaaaaaaaaaaaaaaaaaaaaaaaaaaaaaaaaaaaaaaugcaucccccccccccccccccccccccccccccccaaaggcucuuuucagagccaccagaauu

SEQ ID NO: 2248 - RNA, 1389 nt, Artificial Sequence
  mRNA product Design a-1 comprising derived and/or modified sequence from YFV__NC_002031.1__SSIgE-NS1 (polyprotein: aa779-1130) (wt)
gggagagucccgcagucggcguccagcggcucugcuuguucgugugugugucguugcaggccuuauucaagcuuaccauggacuggaccuggauccuguuccucguggccgccgcgacccgcguccacagcgaucaaggaugcgccaucaacuuuggcaagagagagcucaagugcggagaugguaucuucauauuuagagacucugaugacuggcugaacaaguacucauacuauccagaagauccugugaagcuugcaucaauagugaaagccucuuuugaagaagggaaguguggccuaaauucaguugacucccuugagcaugagauguggagaagcagggcagaugagaucaaugccauuuuugaggaaaacgagguggacauuucuguugucgugcaggauccaaagaauguuuaccagagaggaacucauccauuuuccagaauucgggauggucugcaguaugguuggaagacuugggguaagaaccuuguguucuccccagggaggaagaauggaagcuucaucauagauggaaaguccaggaaagaaugcccguuuucaaaccgggucuggaauucuuuccagauagaggaguuugggacgggaguguucaccacacgcguguacauggacgcagucuuugaauacaccauagacugcgauggaucuaucuugggugcagcggugaacggaaaaaagagugcccauggcucuccaacauuuuggaugggaagucaugaaguaaaugggacauggaugauccacaccuuggaggcauuagauuacaaggagugugaguggccacugacacauacgauuggaacaucaguugaagagagugaaauguucaugccgagaucaaucggaggcccaguuagcucucacaaucauaucccuggauacaagguucagacgaacggaccuuggaugcagguaccacuagaagugaagagagaagcuugcccagggacuagcgugaucauugauggcaacugugauggacggggaaaaucaaccagauccaccacggauagcgggaaaguuauuccugaaugguguugccgcuccugcacaaugccgccugugagcuuccaugguagugauggguguugguaucccauggaaauuaggccaaggaaaacgcaugaaagccaucuggugcgcuccuggguuacagcuugaggacuagucccuguucccagagcccacuuuuuuuucuuuuuuugaaauaaaauagccugucuuucagaucuaaaaaaaaaaaaaaaaaaaaaaaaaaaaaaaaaaaaaaaaaaaaaaaaaaaaaaaaaaaaaaaaugcaucccccccccccccccccccccccccccccccaaaggcucuuuucagagccaccagaauu

SEQ ID NO: 2249 - RNA, 1539 nt, Artificial Sequence
  mRNA product Design a-1 comprising derived and/or modified sequence from YFV__NC_002031.1__eSS-NS1-Y (polyprotein: aa758-1177) (opt1)
gggagagucccgcagucggcguccagcggcucugcuuguucgugugugugucguugcaggccuuauucaagcuuaccaugagcauguccaugauccuggugggcgucaucaugauguuccucagccugggggugggcgccgaccaggggugcgccaucaacuucggcaagcgcgagcugaagugcggggacggcaucuucaucuuccgggacuccgacgacuggcucaacaaguacagcuacuaccccgaggacccggugaagcuggcguccaucgucaaggccagcuucgaggagggcaagugcgggcugaacuccguggacagccucgagcacgagauguggcgcucccgggccgacgagaucaacgccaucuucgaggagaacgagguggacaucagcgucguggugcaggaccccaagaacgucuaccagcgcggcacccaccccuucucccggauccgcgacgggcugcaguacggcuggaagaccugggggaagaaccugguguucagccccggccggaagaacggcuccuucaucaucgacggcaagagccgcaaggagugcccguucuccaaccggguguggaacagcuuccagaucgaggaguucgggacgggggucuucaccacccgcguguacauggacgccguguucgaguacaccaucgacugcgacggcuccauccucggcgcggccgucaacgggaagaaguccgcccacggcagccccacguucuggauggggagccacgaggugaacggcaccuggaugauccacacccuggaggcccuggacuacaaggagugcgaguggccccucacccacacgaucgggaccagcguggaggaguccgagauguucaugccccggagcaucggcggcccggucuccagccacaaccacauccccggguacaaggugcagaccaacggccccuggaugcaggucccccuggaggugaagcgcgaggcgugcccggggaccuccgugaucaucgacggcaacugcgacgggcggggcaagagcacgcgcuccaccaccgacagcggcaaggugauccccgaguggugcugccgguccugcaccaugccgcccgucagcuuccacggguccgacggcugcugguaccccauggagauccgcccccggaagacgcacgagagccaccuggugcgcuccugggucaccgccggggagauccacgccgugcccuucggccucgugagcaugaugaucgccauggaggucgugcugcggaagcgccaggggcccaagcagaugcuggugggcggcgucgugcuccugggggccaugcuggugggccaggucaccugaggacuagucccuguucccagagcccacuuuuuuuucuuuuuuugaaauaaaauagccugucuuucagaucuaaaaaaaaaaaaaaaaaaaaaaaaaaaaaaaaaaaaaaaaaaaaaaaaaaaaaaaaaaaaaaaaugcaucccccccccccccccccccccccccccccccaaaggcucuuuucagagccaccagaauu

SEQ ID NO: 2250 - RNA, 1398 nt, Artificial Sequence
  mRNA product Design a-1 comprising derived and/or modified sequence from YFV__NC_002031.1__eSS-NS1 (polyprotein: aa758-1130) (opt1)
gggagagucccgcagucggcguccagcggcucugcuuguucgugugugugucguugcaggccuuauucaagcuuaccaugagcauguccaugauccuggugggcgucaucaugauguuccucagccugggggugggcgccgaccaggggugcgccaucaacuucggcaagcgcgagcugaagugcggggacggcaucuucaucuuccgggacuccgacgacuggcucaacaaguacagcuacuaccccgaggacccggugaagcuggcguccaucgucaaggccagcuucgaggagggcaagugcgggcugaacuccguggacagccucgagcacgagauguggcgcucccgggccgacgagaucaacgccaucuucgaggagaacgagguggacaucagcgucguggugcaggaccccaagaacgucuaccagcgcggcacccaccccuucucccggauccgcgacgggcugcaguacggcuggaagaccugggggaagaaccugguguucagccccggccggaagaacggcuccuucaucaucgacggcaagagccgcaaggagugcccguucuccaaccggguguggaacagcuuccagaucgaggaguucgggacgggggucuucaccacccgcguguacauggacgccguguucgaguacaccaucgacugcgacggcuccauccucggcgcggccgucaacgggaagaaguccgcccacggcagccccacguucuggauggggagccacgaggugaacggcaccuggaugauccacacccuggaggcccuggacuacaaggagugcgaguggccccucacccacacgaucgggaccagcguggaggaguccgagauguucaugccccggagcaucggcggcccggucuccagccacaaccacauccccggguacaaggugcagaccaacggccccuggaugcaggucccccuggaggugaagcgcgaggcgugcccggggaccuccgugaucaucgacggcaacugcgacgggcggggcaagagcacgcgcuccaccaccgacagcggcaaggugauccccgaguggugcugccgguccugcaccaugccgcccgucagcuuccacggguccgacggcugcugguaccccauggagauccgcccccggaagacgcacgagagccaccuggugcgcuccugggucaccgccugaggacuagucccuguucccagagcccacuuuuuuuucuuuuuuugaaauaaaauagccugucuuucagaucuaaaaaaaaaaaaaaaaaaaaaaaaaaaaaaaaaaaaaaaaaaaaaaaaaaaaaaaaaaaaaaaaugcaucccccccccccccccccccccccccccccccaaaggcucuuuucagagccaccagaauu

SEQ ID NO: 2251 - RNA, 1389 nt, Artificial Sequence
  mRNA product Design a-1 comprising derived and/or modified sequence from YFV__NC_002031.1__SSIgE-NS1 (polyprotein: aa779-1130) (opt1)
gggagagucccgcagucggcguccagcggcucugcuuguucgugugugugucguugcaggccuuauucaagcuuaccauggacuggaccuggauccuguuccucguggccgccgcgacccgcguccacagcgaccaggggugcgccaucaacuucggcaagcgcgagcugaagugcggggacggcaucuucaucuuccgggacuccgacgacuggcucaacaaguacagcuacuaccccgaggacccggugaagcuggcguccaucgucaaggccagcuucgaggagggcaagugcgggcugaacuccguggacagccucgagcacgagauguggcgcucccgggccgacgagaucaacgccaucuucgaggagaacgagguggacaucagcgucguggugcaggaccccaagaacgucuaccagcgcggcacccaccccuucucccggauccgcgacgggcugcaguacggcuggaagaccugggggaagaaccugguguucagccccggccggaagaacggcuccuucaucaucgacggcaagagccgcaaggagugcccguucuccaaccggguguggaacagcuuccagaucgaggaguucgggacgggggucuucaccacccgcguguacauggacgccguguucgaguacaccaucgacugcgacggcuccauccucggcgcggccgucaacgggaagaaguccgcccacggcagccccacguucuggauggggagccacgaggugaacggcaccuggaugauccacacccuggaggcccuggacuacaaggagugcgaguggccccucacccacacgaucgggaccagcguggaggaguccgagauguucaugccccggagcaucggcggcccggucuccagccacaaccacauccccggguacaaggugcagaccaacggccccuggaugcaggucccccuggaggugaagcgcgaggcgugcccggggaccuccgugaucaucgacggcaacugcgacgggcggggcaagagcacgcgcuccaccaccgacagcggcaaggugauccccgaguggugcugccgguccugcaccaugccgcccgucagcuuccacggguccgacggcugcugguaccccauggagauccgcccccggaagacgcacgagagccaccuggugcgcuccugggucaccgccugaggacuagucccuguucccagagcccacuuuuuuuucuuuuuuugaaauaaaauagccugucuuucagaucuaaaaaaaaaaaaaaaaaaaaaaaaaaaaaaaaaaaaaaaaaaaaaaaaaaaaaaaaaaaaaaaaugcaucccccccccccccccccccccccccccccccaaaggcucuuuucagagccaccagaauu

SEQ ID NO: 2252 - RNA, 1539 nt, Artificial Sequence
  mRNA product Design a-1 comprising derived and/or modified sequence from YFV__NC_002031.1__eSS-NS1-Y (polyprotein: aa758-1177) (opt2)
gggagagucccgcagucggcguccagcggcucugcuuguucgugugugugucguugcaggccuuauucaagcuuaccauguccauguccaugauccucgucggcgucaucaugauguuccucucccucggcgucggcgccgaccagggcugcgccaucaacuucggcaagcgcgagcucaagugcggcgacggcaucuucaucuuccgcgacuccgacgacuggcucaacaaguacuccuacuaccccgaggaccccgucaagcucgccuccaucgucaaggccuccuucgaggagggcaagugcggccucaacuccgucgacucccucgagcacgagauguggcgcucccgcgccgacgagaucaacgccaucuucgaggagaacgaggucgacaucuccgucgucguccaggaccccaagaacgucuaccagcgcggcacccaccccuucucccgcauccgcgacggccuccaguacggcuggaagaccuggggcaagaaccucgucuucucccccggccgcaagaacggcuccuucaucaucgacggcaagucccgcaaggagugccccuucuccaaccgcgucuggaacuccuuccagaucgaggaguucggcaccggcgucuucaccacccgcgucuacauggacgccgucuucgaguacaccaucgacugcgacggcuccauccucggcgccgccgucaacggcaagaaguccgcccacggcucccccaccuucuggaugggcucccacgaggucaacggcaccuggaugauccacacccucgaggcccucgacuacaaggagugcgaguggccccucacccacaccaucggcaccuccgucgaggaguccgagauguucaugccccgcuccaucggcggccccgucuccucccacaaccacauccccggcuacaagguccagaccaacggccccuggaugcaggucccccucgaggucaagcgcgaggccugccccggcaccuccgucaucaucgacggcaacugcgacggccgcggcaaguccacccgcuccaccaccgacuccggcaaggucauccccgaguggugcugccgcuccugcaccaugccccccgucuccuuccacggcuccgacggcugcugguaccccauggagauccgcccccgcaagacccacgagucccaccucguccgcuccugggucaccgccggcgagauccacgccguccccuucggccucgucuccaugaugaucgccauggaggucguccuccgcaagcgccagggccccaagcagaugcucgucggcggcgucguccuccucggcgccaugcucgucggccaggucaccugaggacuagucccuguucccagagcccacuuuuuuuucuuuuuuugaaauaaaauagccugucuuucagaucuaaaaaaaaaaaaaaaaaaaaaaaaaaaaaaaaaaaaaaaaaaaaaaaaaaaaaaaaaaaaaaaaugcaucccccccccccccccccccccccccccccccaaaggcucuuuucagagccaccagaauu

SEQ ID NO: 2253 - RNA, 1398 nt, Artificial Sequence
  mRNA product Design a-1 comprising derived and/or modified sequence from YFV__NC_002031.1__eSS-NS1 (polyprotein: aa758-1130) (opt2)
gggagagucccgcagucggcguccagcggcucugcuuguucgugugugugucguugcaggccuuauucaagcuuaccauguccauguccaugauccucgucggcgucaucaugauguuccucucccucggcgucggcgccgaccagggcugcgccaucaacuucggcaagcgcgagcucaagugcggcgacggcaucuucaucuuccgcgacuccgacgacuggcucaacaaguacuccuacuaccccgaggaccccgucaagcucgccuccaucgucaaggccuccuucgaggagggcaagugcggccucaacuccgucgacucccucgagcacgagauguggcgcucccgcgccgacgagaucaacgccaucuucgaggagaacgaggucgacaucuccgucgucguccaggaccccaagaacgucuaccagcgcggcacccaccccuucucccgcauccgcgacggccuccaguacggcuggaagaccuggggcaagaaccucgucuucucccccggccgcaagaacggcuccuucaucaucgacggcaagucccgcaaggagugccccuucuccaaccgcgucuggaacuccuuccagaucgaggaguucggcaccggcgucuucaccacccgcgucuacauggacgccgucuucgaguacaccaucgacugcgacggcuccauccucggcgccgccgucaacggcaagaaguccgcccacggcucccccaccuucuggaugggcucccacgaggucaacggcaccuggaugauccacacccucgaggcccucgacuacaaggagugcgaguggccccucacccacaccaucggcaccuccgucgaggaguccgagauguucaugccccgcuccaucggcggccccgucuccucccacaaccacauccccggcuacaagguccagaccaacggccccuggaugcaggucccccucgaggucaagcgcgaggccugccccggcaccuccgucaucaucgacggcaacugcgacggccgcggcaaguccacccgcuccaccaccgacuccggcaaggucauccccgaguggugcugccgcuccugcaccaugccccccgucuccuuccacggcuccgacggcugcugguaccccauggagauccgcccccgcaagacccacgagucccaccucguccgcuccugggucaccgccugaggacuagucccuguucccagagcccacuuuuuuuucuuuuuuugaaauaaaauagccugucuuucagaucuaaaaaaaaaaaaaaaaaaaaaaaaaaaaaaaaaaaaaaaaaaaaaaaaaaaaaaaaaaaaaaaaugcaucccccccccccccccccccccccccccccccaaaggcucuuuucagagccaccagaauu

SEQ ID NO: 2254 - RNA, 1389 nt, Artificial Sequence
  mRNA product Design a-1 comprising derived and/or modified sequence from YFV__NC_002031.1__SSIgE-NS1 (polyprotein: aa779-1130) (opt2)
gggagagucccgcagucggcguccagcggcucugcuuguucgugugugugucguugcaggccuuauucaagcuuaccauggacuggaccuggauccucuuccucgucgccgccgccacccgcguccacuccgaccagggcugcgccaucaacuucggcaagcgcgagcucaagugcggcgacggcaucuucaucuuccgcgacuccgacgacuggcucaacaaguacuccuacuaccccgaggaccccgucaagcucgccuccaucgucaaggccuccuucgaggagggcaagugcggccucaacuccgucgacucccucgagcacgagauguggcgcucccgcgccgacgagaucaacgccaucuucgaggagaacgaggucgacaucuccgucgucguccaggaccccaagaacgucuaccagcgcggcacccaccccuucucccgcauccgcgacggccuccaguacggcuggaagaccuggggcaagaaccucgucuucucccccggccgcaagaacggcuccuucaucaucgacggcaagucccgcaaggagugccccuucuccaaccgcgucuggaacuccuuccagaucgaggaguucggcaccggcgucuucaccacccgcgucuacauggacgccgucuucgaguacaccaucgacugcgacggcuccauccucggcgccgccgucaacggcaagaaguccgcccacggcucccccaccuucuggaugggcucccacgaggucaacggcaccuggaugauccacacccucgaggcccucgacuacaaggagugcgaguggccccucacccacaccaucggcaccuccgucgaggaguccgagauguucaugccccgcuccaucggcggccccgucuccucccacaaccacauccccggcuacaagguccagaccaacggccccuggaugcaggucccccucgaggucaagcgcgaggccugccccggcaccuccgucaucaucgacggcaacugcgacggccgcggcaaguccacccgcuccaccaccgacuccggcaaggucauccccgaguggugcugccgcuccugcaccaugccccccgucuccuuccacggcuccgacggcugcugguaccccauggagauccgcccccgcaagacccacgagucccaccucguccgcuccugggucaccgccugaggacuagucccuguucccagagcccacuuuuuuuucuuuuuuugaaauaaaauagccugucuuucagaucuaaaaaaaaaaaaaaaaaaaaaaaaaaaaaaaaaaaaaaaaaaaaaaaaaaaaaaaaaaaaaaaaugcaucccccccccccccccccccccccccccccccaaaggcucuuuucagagccaccagaauu

SEQ ID NO: 2255 - RNA, 1539 nt, Artificial Sequence
  mRNA product Design a-1 comprising derived and/or modified sequence from YFV__NC_002031.1__eSS-NS1-Y (polyprotein: aa758-1177) (opt3)
gggagagucccgcagucggcguccagcggcucugcuuguucgugugugugucguugcaggccuuauucaagcuuaccaugagcauguccaugauccuggugggcgucauuaugauguuccucucucuugggguuggagccgaccaggguugcgcuauaaacuuuggcaagagagagcugaaauguggggauggaaucuucauuuuuagggacucagaugacugguugaauaaguacaguuauuaccccgaagauccugugaaauuagcaagcaucguaaaggccuccuucgaggaaggcaaaugcggucugaacucuguggacucgcuagagcacgaaauguggcggucacgcgcggaugagauuaaugcuaucuuugaggaaaacgaggucgacauaagcgugguugugcaagauccaaagaaugucuaucagcgagggacccauccguucagucguaucagagacggacuccaguacggcuggaagacauggggcaaaaaccugguguuuucccccgggaggaagaauggaucuuucauuaucgaugguaaaagccggaaggaauguccuuuuuccaaccgcguauggaacucauuccagauugaggaguuuggcacugggguuuucacgaccagaguguauauggacgccgucuuugaauacacaaucgauugcgacggaaguauacuuggcgcagccgugaaugguaaaaagagcgcucacgggucuccaacuuucuggaugggaucccaugaggugaauggcaccuggaugauucacacacuggaagcauuggacuauaaggagugugaauggccccucacccauacuaucggcacaucagucgaggagagcgaaauguucaugccuaggaguauugggggaccaguuucuucccacaaccacauccccgguuacaaagugcaaaccaauggcccuuggaugcagguaccacuggaggugaagcgggaagccugcccggggacgagcgucaucauugauggaaacugugacggccgcgguaaaucgacucgaucuaccacagauuccgggaaggugauacccgaguggugcuguagaucaugcacuaugccuccaguuaguuuucauggcagcgacggauguugguaccccauggaaaucaggccucggaaaacccacgagucccaucuggugcguucuugggucacagcuggcgagauucacgccgugccauucgggcucguaagcaugaugaucgcgauggaaguuguguuacgcaagagacagggacccaaacagaugcuggucgguggcgugguccuuuugggggcaaugcuggugggacaaguuaccugaggacuagucccuguucccagagcccacuuuuuuuucuuuuuuugaaauaaaauagccugucuuucagaucuaaaaaaaaaaaaaaaaaaaaaaaaaaaaaaaaaaaaaaaaaaaaaaaaaaaaaaaaaaaaaaaaugcaucccccccccccccccccccccccccccccccaaaggcucuuuucagagccaccagaauu

SEQ ID NO: 2256 - RNA, 1398 nt, Artificial Sequence
  mRNA product Design a-1 comprising derived and/or modified sequence from YFV__NC_002031.1__eSS-NS1 (polyprotein: aa758-1130) (opt3)
gggagagucccgcagucggcguccagcggcucugcuuguucgugugugugucguugcaggccuuauucaagcuuaccaugagcauguccaugauccuggugggcgucauuaugauguuccucucucuugggguuggagccgaccaggguugcgcuauaaacuuuggcaagagagagcugaaauguggggauggaaucuucauuuuuagggacucagaugacugguugaauaaguacaguuauuaccccgaagauccugugaaauuagcaagcaucguaaaggccuccuucgaggaaggcaaaugcggucugaacucuguggacucgcuagagcacgaaauguggcggucacgcgcggaugagauuaaugcuaucuuugaggaaaacgaggucgacauaagcgugguugugcaagauccaaagaaugucuaucagcgagggacccauccguucagucguaucagagacggacuccaguacggcuggaagacauggggcaaaaaccugguguuuucccccgggaggaagaauggaucuuucauuaucgaugguaaaagccggaaggaauguccuuuuuccaaccgcguauggaacucauuccagauugaggaguuuggcacugggguuuucacgaccagaguguauauggacgccgucuuugaauacacaaucgauugcgacggaaguauacuuggcgcagccgugaaugguaaaaagagcgcucacgggucuccaacuuucuggaugggaucccaugaggugaauggcaccuggaugauucacacacuggaagcauuggacuauaaggagugugaauggccccucacccauacuaucggcacaucagucgaggagagcgaaauguucaugccuaggaguauugggggaccaguuucuucccacaaccacauccccgguuacaaagugcaaaccaauggcccuuggaugcagguaccacuggaggugaagcgggaagccugcccggggacgagcgucaucauugauggaaacugugacggccgcgguaaaucgacucgaucuaccacagauuccgggaaggugauacccgaguggugcuguagaucaugcacuaugccuccaguuaguuuucauggcagcgacggauguugguaccccauggaaaucaggccucggaaaacccacgagucccaucuggugcguucuugggucacagcuugaggacuagucccuguucccagagcccacuuuuuuuucuuuuuuugaaauaaaauagccugucuuucagaucuaaaaaaaaaaaaaaaaaaaaaaaaaaaaaaaaaaaaaaaaaaaaaaaaaaaaaaaaaaaaaaaaugcaucccccccccccccccccccccccccccccccaaaggcucuuuucagagccaccagaauu

SEQ ID NO: 2257 - RNA, 1389 nt, Artificial Sequence
  mRNA product Design a-1 comprising derived and/or modified sequence from YFV__NC_002031.1__SSIgE-NS1 (polyprotein: aa779-1130) (opt3)
gggagagucccgcagucggcguccagcggcucugcuuguucgugugugugucguugcaggccuuauucaagcuuaccauggacuggaccuggauccuguuccucguggccgcugcaacaagaguccacagcgaccaggguugcgcuauaaacuuuggcaagagagagcugaaauguggggauggaaucuucauuuuuagggacucagaugacugguugaauaaguacaguuauuaccccgaagauccugugaaauuagcaagcaucguaaaggccuccuucgaggaaggcaaaugcggucugaacucuguggacucgcuagagcacgaaauguggcggucacgcgcggaugagauuaaugcuaucuuugaggaaaacgaggucgacauaagcgugguugugcaagauccaaagaaugucuaucagcgagggacccauccguucagucguaucagagacggacuccaguacggcuggaagacauggggcaaaaaccugguguuuucccccgggaggaagaauggaucuuucauuaucgaugguaaaagccggaaggaauguccuuuuuccaaccgcguauggaacucauuccagauugaggaguuuggcacugggguuuucacgaccagaguguauauggacgccgucuuugaauacacaaucgauugcgacggaaguauacuuggcgcagccgugaaugguaaaaagagcgcucacgggucuccaacuuucuggaugggaucccaugaggugaauggcaccuggaugauucacacacuggaagcauuggacuauaaggagugugaauggccccucacccauacuaucggcacaucagucgaggagagcgaaauguucaugccuaggaguauugggggaccaguuucuucccacaaccacauccccgguuacaaagugcaaaccaauggcccuuggaugcagguaccacuggaggugaagcgggaagccugcccggggacgagcgucaucauugauggaaacugugacggccgcgguaaaucgacucgaucuaccacagauuccgggaaggugauacccgaguggugcuguagaucaugcacuaugccuccaguuaguuuucauggcagcgacggauguugguaccccauggaaaucaggccucggaaaacccacgagucccaucuggugcguucuugggucacagcuugaggacuagucccuguucccagagcccacuuuuuuuucuuuuuuugaaauaaaauagccugucuuucagaucuaaaaaaaaaaaaaaaaaaaaaaaaaaaaaaaaaaaaaaaaaaaaaaaaaaaaaaaaaaaaaaaaugcaucccccccccccccccccccccccccccccccaaaggcucuuuucagagccaccagaauu

SEQ ID NO: 2258 - RNA, 1539 nt, Artificial Sequence
  mRNA product Design a-1 comprising derived and/or modified sequence from YFV__NC_002031.1__eSS-NS1-Y (polyprotein: aa758-1177) (opt4)
gggagagucccgcagucggcguccagcggcucugcuuguucgugugugugucguugcaggccuuauucaagcuuaccaugagcaugagcaugauccuggugggcgugaucaugauguuccugagccugggcgugggcgccgaccagggcugcgccaucaacuucggcaagagagagcugaagugcggcgacggcaucuucaucuucagagacagcgacgacuggcugaacaaguacagcuacuaccccgaggaccccgugaagcuggccagcaucgugaaggccagcuucgaggagggcaagugcggccugaacagcguggacagccuggagcacgagauguggagaagcagagccgacgagaucaacgccaucuucgaggagaacgagguggacaucagcgugguggugcaggaccccaagaacguguaccagagaggcacccaccccuucagcagaaucagagacggccugcaguacggcuggaagaccuggggcaagaaccugguguucagccccggcagaaagaacggcagcuucaucaucgacggcaagagcagaaaggagugccccuucagcaacagaguguggaacagcuuccagaucgaggaguucggcaccggcguguucaccaccagaguguacauggacgccguguucgaguacaccaucgacugcgacggcagcauccugggcgccgccgugaacggcaagaagagcgcccacggcagccccaccuucuggaugggcagccacgaggugaacggcaccuggaugauccacacccuggaggcccuggacuacaaggagugcgaguggccccugacccacaccaucggcaccagcguggaggagagcgagauguucaugcccagaagcaucggcggccccgugagcagccacaaccacauccccggcuacaaggugcagaccaacggccccuggaugcaggugccccuggaggugaagagagaggccugccccggcaccagcgugaucaucgacggcaacugcgacggcagaggcaagagcaccagaagcaccaccgacagcggcaaggugauccccgaguggugcugcagaagcugcaccaugccccccgugagcuuccacggcagcgacggcugcugguaccccauggagaucagacccagaaagacccacgagagccaccuggugagaagcugggugaccgccggcgagauccacgccgugcccuucggccuggugagcaugaugaucgccauggagguggugcugagaaagagacagggccccaagcagaugcuggugggcggcguggugcugcugggcgccaugcuggugggccaggugaccugaggacuagucccuguucccagagcccacuuuuuuuucuuuuuuugaaauaaaauagccugucuuucagaucuaaaaaaaaaaaaaaaaaaaaaaaaaaaaaaaaaaaaaaaaaaaaaaaaaaaaaaaaaaaaaaaaugcaucccccccccccccccccccccccccccccccaaaggcucuuuucagagccaccagaauu

SEQ ID NO: 2259 - RNA, 1398 nt, Artificial Sequence
  mRNA product Design a-1 comprising derived and/or modified sequence from YFV__NC_002031.1__eSS-NS1 (polyprotein: aa758-1130) (opt4)
gggagagucccgcagucggcguccagcggcucugcuuguucgugugugugucguugcaggccuuauucaagcuuaccaugagcaugagcaugauccuggugggcgugaucaugauguuccugagccugggcgugggcgccgaccagggcugcgccaucaacuucggcaagagagagcugaagugcggcgacggcaucuucaucuucagagacagcgacgacuggcugaacaaguacagcuacuaccccgaggaccccgugaagcuggccagcaucgugaaggccagcuucgaggagggcaagugcggccugaacagcguggacagccuggagcacgagauguggagaagcagagccgacgagaucaacgccaucuucgaggagaacgagguggacaucagcgugguggugcaggaccccaagaacguguaccagagaggcacccaccccuucagcagaaucagagacggccugcaguacggcuggaagaccuggggcaagaaccugguguucagccccggcagaaagaacggcagcuucaucaucgacggcaagagcagaaaggagugccccuucagcaacagaguguggaacagcuuccagaucgaggaguucggcaccggcguguucaccaccagaguguacauggacgccguguucgaguacaccaucgacugcgacggcagcauccugggcgccgccgugaacggcaagaagagcgcccacggcagccccaccuucuggaugggcagccacgaggugaacggcaccuggaugauccacacccuggaggcccuggacuacaaggagugcgaguggccccugacccacaccaucggcaccagcguggaggagagcgagauguucaugcccagaagcaucggcggccccgugagcagccacaaccacauccccggcuacaaggugcagaccaacggccccuggaugcaggugccccuggaggugaagagagaggccugccccggcaccagcgugaucaucgacggcaacugcgacggcagaggcaagagcaccagaagcaccaccgacagcggcaaggugauccccgaguggugcugcagaagcugcaccaugccccccgugagcuuccacggcagcgacggcugcugguaccccauggagaucagacccagaaagacccacgagagccaccuggugagaagcugggugaccgccugaggacuagucccuguucccagagcccacuuuuuuuucuuuuuuugaaauaaaauagccugucuuucagaucuaaaaaaaaaaaaaaaaaaaaaaaaaaaaaaaaaaaaaaaaaaaaaaaaaaaaaaaaaaaaaaaaugcaucccccccccccccccccccccccccccccccaaaggcucuuuucagagccaccagaauu

SEQ ID NO: 2260 - RNA, 1389 nt, Artificial Sequence
  mRNA product Design a-1 comprising derived and/or modified sequence from YFV__NC_002031.1__SSIgE-NS1 (polyprotein: aa779-1130) (opt4)
gggagagucccgcagucggcguccagcggcucugcuuguucgugugugugucguugcaggccuuauucaagcuuaccauggacuggaccuggauccuguuccugguggccgccgccaccagagugcacagcgaccagggcugcgccaucaacuucggcaagagagagcugaagugcggcgacggcaucuucaucuucagagacagcgacgacuggcugaacaaguacagcuacuaccccgaggaccccgugaagcuggccagcaucgugaaggccagcuucgaggagggcaagugcggccugaacagcguggacagccuggagcacgagauguggagaagcagagccgacgagaucaacgccaucuucgaggagaacgagguggacaucagcgugguggugcaggaccccaagaacguguaccagagaggcacccaccccuucagcagaaucagagacggccugcaguacggcuggaagaccuggggcaagaaccugguguucagccccggcagaaagaacggcagcuucaucaucgacggcaagagcagaaaggagugccccuucagcaacagaguguggaacagcuuccagaucgaggaguucggcaccggcguguucaccaccagaguguacauggacgccguguucgaguacaccaucgacugcgacggcagcauccugggcgccgccgugaacggcaagaagagcgcccacggcagccccaccuucuggaugggcagccacgaggugaacggcaccuggaugauccacacccuggaggcccuggacuacaaggagugcgaguggccccugacccacaccaucggcaccagcguggaggagagcgagauguucaugcccagaagcaucggcggccccgugagcagccacaaccacauccccggcuacaaggugcagaccaacggccccuggaugcaggugccccuggaggugaagagagaggccugccccggcaccagcgugaucaucgacggcaacugcgacggcagaggcaagagcaccagaagcaccaccgacagcggcaaggugauccccgaguggugcugcagaagcugcaccaugccccccgugagcuuccacggcagcgacggcugcugguaccccauggagaucagacccagaaagacccacgagagccaccuggugagaagcugggugaccgccugaggacuagucccuguucccagagcccacuuuuuuuucuuuuuuugaaauaaaauagccugucuuucagaucuaaaaaaaaaaaaaaaaaaaaaaaaaaaaaaaaaaaaaaaaaaaaaaaaaaaaaaaaaaaaaaaaugcaucccccccccccccccccccccccccccccccaaaggcucuuuucagagccaccagaauu

SEQ ID NO: 2261 - RNA, 1539 nt, Artificial Sequence
  mRNA product Design a-1 comprising derived and/or modified sequence from YFV__NC_002031.1__eSS-NS1-Y (polyprotein: aa758-1177) (opt5)
gggagagucccgcagucggcguccagcggcucugcuuguucgugugugugucguugcaggccuuauucaagcuuaccaugagcauguccaugauccuggugggcgucauuaugauguuccucucucuggggguuggagccgaccagggcugcgcuaucaacuuugggaagagagagcuuaaauguggagauggcauuuucaucuuucgggacagcgaugacuggcugaauaaguacuccuauuaccccgaagauccugugaaacucgccucuauugugaaggcgagcuucgaggaagggaaaugcggacugaacuccgucgacucucuugagcacgaaauguggcgcagcagagcugaugagaucaaugccaucuuugaggaaaacgagguggacauuuccguugugguccaagauccgaagaauguguaucagcggggcacccaucccuucagccgcaucagagacggccugcaguacggguggaagacauggggcaaaaaccucguguuuucuccuggacggaagaauggguccuucauuaucgauggaaaaagccgcaaggaaugucccuuuucuaacagaguguggaacuccuuccagauugaggaguuuggcacgggggucuucaccacacggguguauauggacgccguguuugaauacaccaucgauugcgacggaagcauucugggcgcugccgucaauggcaaaaagucugcucacggguccccuacauucuggaugggaagccaugagguuaauggcaccuggaugauccacacacuggaagcccucgacuauaaggagugugaauggccccugacccauacgaucgggaccuccguggaggagucugaaauguucaugccucgcagcauuggaggcccgguguccagccacaaccacauccccggguacaaaguccaaacaaauggaccuuggaugcagguuccccuugagguuaagagagaagcgugcccuggcaccucugugauuaucgauggcaacugugacgggcggggaaaauccacacgcagcaccacggauucuggcaaggucauucccgaguggugcuguagaagcugcacaaugccgccuguguccuuucaugggucugacggauguugguaccccauggaaauccggccucgcaaaacccacgagagccaucugguuagauccugggugacagccggcgagauccacgcuguccccuucgggcucgugagcaugaugauugccauggaagucgugcugcggaagagacagggccccaaacagaugcuuguuggaggcgugguccugcucggggcuaugcuggugggacaaguuaccugaggacuagucccuguucccagagcccacuuuuuuuucuuuuuuugaaauaaaauagccugucuuucagaucuaaaaaaaaaaaaaaaaaaaaaaaaaaaaaaaaaaaaaaaaaaaaaaaaaaaaaaaaaaaaaaaaugcaucccccccccccccccccccccccccccccccaaaggcucuuuucagagccaccagaauu

SEQ ID NO: 2262 - RNA, 1398 nt, Artificial Sequence
  mRNA product Design a-1 comprising derived and/or modified sequence from YFV__NC_002031.1__eSS-NS1 (polyprotein: aa758-1130) (opt5)
gggagagucccgcagucggcguccagcggcucugcuuguucgugugugugucguugcaggccuuauucaagcuuaccaugagcauguccaugauccuggugggcgucauuaugauguuccucucucuggggguuggagccgaccagggcugcgcuaucaacuuugggaagagagagcuuaaauguggagauggcauuuucaucuuucgggacagcgaugacuggcugaauaaguacuccuauuaccccgaagauccugugaaacucgccucuauugugaaggcgagcuucgaggaagggaaaugcggacugaacuccgucgacucucuugagcacgaaauguggcgcagcagagcugaugagaucaaugccaucuuugaggaaaacgagguggacauuuccguugugguccaagauccgaagaauguguaucagcggggcacccaucccuucagccgcaucagagacggccugcaguacggguggaagacauggggcaaaaaccucguguuuucuccuggacggaagaauggguccuucauuaucgauggaaaaagccgcaaggaaugucccuuuucuaacagaguguggaacuccuuccagauugaggaguuuggcacgggggucuucaccacacggguguauauggacgccguguuugaauacaccaucgauugcgacggaagcauucugggcgcugccgucaauggcaaaaagucugcucacggguccccuacauucuggaugggaagccaugagguuaauggcaccuggaugauccacacacuggaagcccucgacuauaaggagugugaauggccccugacccauacgaucgggaccuccguggaggagucugaaauguucaugccucgcagcauuggaggcccgguguccagccacaaccacauccccggguacaaaguccaaacaaauggaccuuggaugcagguuccccuugagguuaagagagaagcgugcccuggcaccucugugauuaucgauggcaacugugacgggcggggaaaauccacacgcagcaccacggauucuggcaaggucauucccgaguggugcuguagaagcugcacaaugccgccuguguccuuucaugggucugacggauguugguaccccauggaaauccggccucgcaaaacccacgagagccaucugguuagauccugggugacagccugaggacuagucccuguucccagagcccacuuuuuuuucuuuuuuugaaauaaaauagccugucuuucagaucuaaaaaaaaaaaaaaaaaaaaaaaaaaaaaaaaaaaaaaaaaaaaaaaaaaaaaaaaaaaaaaaaugcaucccccccccccccccccccccccccccccccaaaggcucuuuucagagccaccagaauu

SEQ ID NO: 2263 - RNA, 1389 nt, Artificial Sequence
  mRNA product Design a-1 comprising derived and/or modified sequence from YFV__NC_002031.1__SSIgE-NS1 (polyprotein: aa779-1130) (opt5)
gggagagucccgcagucggcguccagcggcucugcuuguucgugugugugucguugcaggccuuauucaagcuuaccauggacuggaccuggauccuguuccucguggccgcugccacaagaguccacagcgaccagggcugcgcuaucaacuuugggaagagagagcuuaaauguggagauggcauuuucaucuuucgggacagcgaugacuggcugaauaaguacuccuauuaccccgaagauccugugaaacucgccucuauugugaaggcgagcuucgaggaagggaaaugcggacugaacuccgucgacucucuugagcacgaaauguggcgcagcagagcugaugagaucaaugccaucuuugaggaaaacgagguggacauuuccguugugguccaagauccgaagaauguguaucagcggggcacccaucccuucagccgcaucagagacggccugcaguacggguggaagacauggggcaaaaaccucguguuuucuccuggacggaagaauggguccuucauuaucgauggaaaaagccgcaaggaaugucccuuuucuaacagaguguggaacuccuuccagauugaggaguuuggcacgggggucuucaccacacggguguauauggacgccguguuugaauacaccaucgauugcgacggaagcauucugggcgcugccgucaauggcaaaaagucugcucacggguccccuacauucuggaugggaagccaugagguuaauggcaccuggaugauccacacacuggaagcccucgacuauaaggagugugaauggccccugacccauacgaucgggaccuccguggaggagucugaaauguucaugccucgcagcauuggaggcccgguguccagccacaaccacauccccggguacaaaguccaaacaaauggaccuuggaugcagguuccccuugagguuaagagagaagcgugcccuggcaccucugugauuaucgauggcaacugugacgggcggggaaaauccacacgcagcaccacggauucuggcaaggucauucccgaguggugcuguagaagcugcacaaugccgccuguguccuuucaugggucugacggauguugguaccccauggaaauccggccucgcaaaacccacgagagccaucugguuagauccugggugacagccugaggacuagucccuguucccagagcccacuuuuuuuucuuuuuuugaaauaaaauagccugucuuucagaucuaaaaaaaaaaaaaaaaaaaaaaaaaaaaaaaaaaaaaaaaaaaaaaaaaaaaaaaaaaaaaaaaugcaucccccccccccccccccccccccccccccccaaaggcucuuuucagagccaccagaauu

SEQ ID NO: 2264 - RNA, 1539 nt, Artificial Sequence
  mRNA product Design a-1 comprising derived and/or modified sequence from YFV__NC_002031.1__eSS-NS1-Y (polyprotein: aa758-1177) (opt6)
gggagagucccgcagucggcguccagcggcucugcuuguucgugugugugucguugcaggccuuauucaagcuuaccaugucaaugaguaugauauuaguagggguaauaaugauguuccuuagcuuaggaguaggagcagaucaaggaugugcaauaaauuuuggaaaaagagaacuaaaaugcggagacgguauauuuauauuuagagauagugaugauuggcuaaauaaauauaguuacuauccagaagauccaguuaaauuagccucaauaguaaaagcuagcuuugaagaaggaaaauguggacuaaauucaguagacagucuagaacacgaaauguggagaucaagggcagaugaaauaaaugcaaucuuugaagaaaaugaaguggauauaucagugguaguacaagauccaaaaaauguguaccaaagaggaacacauccauuuaguaggauaagagauggauuacaauauggauggaaaacauggggaaaaaauuuaguauuuaguccaggaagaaaaaauggaucauuuauaauagaugggaaaagccgaaaagaauguccauuuucaaacagaguauggaacucauuucaaauugaagaauuuggaacaggaguauuuacaacaagaguauauauggaugcaguauuugaauacaccauagauugugauggaaguauauuaggagcagcaguaaaugggaaaaaaagcgcucacggaaguccaacguuuuggaugggaucacacgagguaaauggcacguggaugauacauacuuuagaagcauuagauuacaaagaaugugaauggccauuaacucauacaauagguacaagcguagaagaaagugagauguuuaugccacguucaaucggggggccaguaucaagucauaaccauauaccaggauauaaaguacaaacgaauggaccuuggaugcaaguaccacuagaaguaaaacgagaagcaugcccaggaacgucaguaauaauagauggaaauugugauggcagggguaaaagcacaagaucaacaacagauucaggaaaaguaauaccugaaugguguuguagaaguuguacaaugccaccaguaucauuccauggaagugauggaugcugguauccaauggaaauuagaccaagaaaaacucaugaaagucauuuaguaagaucuuggguaacugcaggagaaauacaugcaguaccauuugguuuaguaaguaugaugauagcaauggaaguaguucuaagaaaaaggcaagggccuaaacaaaugcuagugggaggaguaguauugcuaggugcaauguuaguaggccaaguaaccugaggacuagucccuguucccagagcccacuuuuuuuucuuuuuuugaaauaaaauagccugucuuucagaucuaaaaaaaaaaaaaaaaaaaaaaaaaaaaaaaaaaaaaaaaaaaaaaaaaaaaaaaaaaaaaaaaugcaucccccccccccccccccccccccccccccccaaaggcucuuuucagagccaccagaauu

SEQ ID NO: 2265 - RNA, 1398 nt, Artificial Sequence
  mRNA product Design a-1 comprising derived and/or modified sequence from YFV__NC_002031.1__eSS-NS1 (polyprotein: aa758-1130) (opt6)
gggagagucccgcagucggcguccagcggcucugcuuguucgugugugugucguugcaggccuuauucaagcuuaccaugucaaugaguaugauauuaguagggguaauaaugauguuccuuagcuuaggaguaggagcagaucaaggaugugcaauaaauuuuggaaaaagagaacuaaaaugcggagacgguauauuuauauuuagagauagugaugauuggcuaaauaaauauaguuacuauccagaagauccaguuaaauuagccucaauaguaaaagcuagcuuugaagaaggaaaauguggacuaaauucaguagacagucuagaacacgaaauguggagaucaagggcagaugaaauaaaugcaaucuuugaagaaaaugaaguggauauaucagugguaguacaagauccaaaaaauguguaccaaagaggaacacauccauuuaguaggauaagagauggauuacaauauggauggaaaacauggggaaaaaauuuaguauuuaguccaggaagaaaaaauggaucauuuauaauagaugggaaaagccgaaaagaauguccauuuucaaacagaguauggaacucauuucaaauugaagaauuuggaacaggaguauuuacaacaagaguauauauggaugcaguauuugaauacaccauagauugugauggaaguauauuaggagcagcaguaaaugggaaaaaaagcgcucacggaaguccaacguuuuggaugggaucacacgagguaaauggcacguggaugauacauacuuuagaagcauuagauuacaaagaaugugaauggccauuaacucauacaauagguacaagcguagaagaaagugagauguuuaugccacguucaaucggggggccaguaucaagucauaaccauauaccaggauauaaaguacaaacgaauggaccuuggaugcaaguaccacuagaaguaaaacgagaagcaugcccaggaacgucaguaauaauagauggaaauugugauggcagggguaaaagcacaagaucaacaacagauucaggaaaaguaauaccugaaugguguuguagaaguuguacaaugccaccaguaucauuccauggaagugauggaugcugguauccaauggaaauuagaccaagaaaaacucaugaaagucauuuaguaagaucuuggguaacugcaugaggacuagucccuguucccagagcccacuuuuuuuucuuuuuuugaaauaaaauagccugucuuucagaucuaaaaaaaaaaaaaaaaaaaaaaaaaaaaaaaaaaaaaaaaaaaaaaaaaaaaaaaaaaaaaaaaugcaucccccccccccccccccccccccccccccccaaaggcucuuuucagagccaccagaauu

SEQ ID NO: 2266 - RNA, 1389 nt, Artificial Sequence
  mRNA product Design a-1 comprising derived and/or modified sequence from YFV__NC_002031.1__SSIgE-NS1 (polyprotein: aa779-1130) (opt6)
gggagagucccgcagucggcguccagcggcucugcuuguucgugugugugucguugcaggccuuauucaagcuuaccauggacuggacauggauauuauuuuuaguagcagcagcaacaagaguacauucagaucaaggaugugcaauaaauuuuggaaaaagagaacuaaaaugcggagacgguauauuuauauuuagagauagugaugauuggcuaaauaaauauaguuacuauccagaagauccaguuaaauuagccucaauaguaaaagcuagcuuugaagaaggaaaauguggacuaaauucaguagacagucuagaacacgaaauguggagaucaagggcagaugaaauaaaugcaaucuuugaagaaaaugaaguggauauaucagugguaguacaagauccaaaaaauguguaccaaagaggaacacauccauuuaguaggauaagagauggauuacaauauggauggaaaacauggggaaaaaauuuaguauuuaguccaggaagaaaaaauggaucauuuauaauagaugggaaaagccgaaaagaauguccauuuucaaacagaguauggaacucauuucaaauugaagaauuuggaacaggaguauuuacaacaagaguauauauggaugcaguauuugaauacaccauagauugugauggaaguauauuaggagcagcaguaaaugggaaaaaaagcgcucacggaaguccaacguuuuggaugggaucacacgagguaaauggcacguggaugauacauacuuuagaagcauuagauuacaaagaaugugaauggccauuaacucauacaauagguacaagcguagaagaaagugagauguuuaugccacguucaaucggggggccaguaucaagucauaaccauauaccaggauauaaaguacaaacgaauggaccuuggaugcaaguaccacuagaaguaaaacgagaagcaugcccaggaacgucaguaauaauagauggaaauugugauggcagggguaaaagcacaagaucaacaacagauucaggaaaaguaauaccugaaugguguuguagaaguuguacaaugccaccaguaucauuccauggaagugauggaugcugguauccaauggaaauuagaccaagaaaaacucaugaaagucauuuaguaagaucuuggguaacugcaugaggacuagucccuguucccagagcccacuuuuuuuucuuuuuuugaaauaaaauagccugucuuucagaucuaaaaaaaaaaaaaaaaaaaaaaaaaaaaaaaaaaaaaaaaaaaaaaaaaaaaaaaaaaaaaaaaugcaucccccccccccccccccccccccccccccccaaaggcucuuuucagagccaccagaauu

SEQ ID NO: 2267 - RNA, 1539 nt, Artificial Sequence
  mRNA product Design a-1 comprising derived and/or modified sequence from YFV__NC_002031.1__eSS-NS1-Y (polyprotein: aa758-1177) (opt11)
gggagagucccgcagucggcguccagcggcucugcuuguucgugugugugucguugcaggccuuauucaagcuuaccaugagcaugagcaugaucuugguaggggucauaaugauguucuugagccuagggguaggcgcagaccagggaugcgcgauaaacuucggcaaacgcgaacucaaaugcggggacggaaucuucaucuuucgcgacagugacgacuggcuaaacaaguacaguuacuacccggaagaccccguaaaacuagccucaauaguaaaagcgagcuucgaagaaggaaagugcgggcuaaacagcguggacucccuagagcacgagauguggaggucgagagcggacgagaucaacgccauauucgaagaaaaugaaguagacauaagcguagucguacaagaucccaaaaacguguaccagcgcggaacccaccccuucagcaggaucagagacgggcuacaauacggauggaagacauggggcaaaaaccuggucuucagcccgggcaggaaaaacggaucguucaucaucgauggcaaaagccgaaaggagugcccguucucaaacaggguauggaacucguuccagaucgaagaguucggcacaggcgucuucacgacaagagucuacauggacgcaguguucgaauacacaaucgacugcgacggcuccauacugggcgcagccgugaacgggaaaaagagcgcacacggaagcccgaccuuuuggauggguucgcacgaggugaacggaacauggaugauacacaccuuagaagcacucgauuacaaagaaugcgaauggcccuuaacccacaccaucgguacguccguagaagaaagcgaaauguucaugccgcgcucaaucggcggcccagucucgagccacaaccacaucccgggcuauaaaguacaaacaaacgggccauggaugcagguaccccucgaggucaagcgcgaagccugccccggaaccucggucaucaucgacggcaacugcgacggcaggggaaaaagcacgcgcucaaccacggacucgggaaagguaauaccagaguggugcugcaggagcugcaccaugccaccgguaucguuccacggcucagacggaugcugguacccgauggaaaucagacccagaaaaacgcacgagagccaccucguacgcucauggguaaccgcaggcgagauccacgccgugccauuuggacuggucucaaugaugauagcgauggaggucgugcucaggaagaggcaagggcccaagcaaaugcucguaggaggaguaguacuccugggcgcaaugcuggucggacaggugaccugaggacuagucccuguucccagagcccacuuuuuuuucuuuuuuugaaauaaaauagccugucuuucagaucuaaaaaaaaaaaaaaaaaaaaaaaaaaaaaaaaaaaaaaaaaaaaaaaaaaaaaaaaaaaaaaaaugcaucccccccccccccccccccccccccccccccaaaggcucuuuucagagccaccagaauu

SEQ ID NO: 2268 - RNA, 1398 nt, Artificial Sequence
  mRNA product Design a-1 comprising derived and/or modified sequence from YFV__NC_002031.1__eSS-NS1 (polyprotein: aa758-1130) (opt11)
gggagagucccgcagucggcguccagcggcucugcuuguucgugugugugucguugcaggccuuauucaagcuuaccaugagcaugagcaugaucuugguaggggucauaaugauguucuugagccuagggguaggcgcagaccagggaugcgcgauaaacuucggcaaacgcgaacucaaaugcggggacggaaucuucaucuuucgcgacagugacgacuggcuaaacaaguacaguuacuacccggaagaccccguaaaacuagccucaauaguaaaagcgagcuucgaagaaggaaagugcgggcuaaacagcguggacucccuagagcacgagauguggaggucgagagcggacgagaucaacgccauauucgaagaaaaugaaguagacauaagcguagucguacaagaucccaaaaacguguaccagcgcggaacccaccccuucagcaggaucagagacgggcuacaauacggauggaagacauggggcaaaaaccuggucuucagcccgggcaggaaaaacggaucguucaucaucgauggcaaaagccgaaaggagugcccguucucaaacaggguauggaacucguuccagaucgaagaguucggcacaggcgucuucacgacaagagucuacauggacgcaguguucgaauacacaaucgacugcgacggcuccauacugggcgcagccgugaacgggaaaaagagcgcacacggaagcccgaccuuuuggauggguucgcacgaggugaacggaacauggaugauacacaccuuagaagcacucgauuacaaagaaugcgaauggcccuuaacccacaccaucgguacguccguagaagaaagcgaaauguucaugccgcgcucaaucggcggcccagucucgagccacaaccacaucccgggcuauaaaguacaaacaaacgggccauggaugcagguaccccucgaggucaagcgcgaagccugccccggaaccucggucaucaucgacggcaacugcgacggcaggggaaaaagcacgcgcucaaccacggacucgggaaagguaauaccagaguggugcugcaggagcugcaccaugccaccgguaucguuccacggcucagacggaugcugguacccgauggaaaucagacccagaaaaacgcacgagagccaccucguacgcucauggguaaccgcaugaggacuagucccuguucccagagcccacuuuuuuuucuuuuuuugaaauaaaauagccugucuuucagaucuaaaaaaaaaaaaaaaaaaaaaaaaaaaaaaaaaaaaaaaaaaaaaaaaaaaaaaaaaaaaaaaaugcaucccccccccccccccccccccccccccccccaaaggcucuuuucagagccaccagaauu

SEQ ID NO: 2269 - RNA, 1389 nt, Artificial Sequence
  mRNA product Design a-1 comprising derived and/or modified sequence from YFV__NC_002031.1__SSIgE-NS1 (polyprotein: aa779-1130) (opt11)
gggagagucccgcagucggcguccagcggcucugcuuguucgugugugugucguugcaggccuuauucaagcuuaccauggauuggacguggauacucuuucucguggccgcggccacgcgcgugcacucggaccagggaugcgcgauaaacuucggcaaacgcgaacucaaaugcggggacggaaucuucaucuuucgcgacagugacgacuggcuaaacaaguacaguuacuacccggaagaccccguaaaacuagccucaauaguaaaagcgagcuucgaagaaggaaagugcgggcuaaacagcguggacucccuagagcacgagauguggaggucgagagcggacgagaucaacgccauauucgaagaaaaugaaguagacauaagcguagucguacaagaucccaaaaacguguaccagcgcggaacccaccccuucagcaggaucagagacgggcuacaauacggauggaagacauggggcaaaaaccuggucuucagcccgggcaggaaaaacggaucguucaucaucgauggcaaaagccgaaaggagugcccguucucaaacaggguauggaacucguuccagaucgaagaguucggcacaggcgucuucacgacaagagucuacauggacgcaguguucgaauacacaaucgacugcgacggcuccauacugggcgcagccgugaacgggaaaaagagcgcacacggaagcccgaccuuuuggauggguucgcacgaggugaacggaacauggaugauacacaccuuagaagcacucgauuacaaagaaugcgaauggcccuuaacccacaccaucgguacguccguagaagaaagcgaaauguucaugccgcgcucaaucggcggcccagucucgagccacaaccacaucccgggcuauaaaguacaaacaaacgggccauggaugcagguaccccucgaggucaagcgcgaagccugccccggaaccucggucaucaucgacggcaacugcgacggcaggggaaaaagcacgcgcucaaccacggacucgggaaagguaauaccagaguggugcugcaggagcugcaccaugccaccgguaucguuccacggcucagacggaugcugguacccgauggaaaucagacccagaaaaacgcacgagagccaccucguacgcucauggguaaccgcaugaggacuagucccuguucccagagcccacuuuuuuuucuuuuuuugaaauaaaauagccugucuuucagaucuaaaaaaaaaaaaaaaaaaaaaaaaaaaaaaaaaaaaaaaaaaaaaaaaaaaaaaaaaaaaaaaaugcaucccccccccccccccccccccccccccccccaaaggcucuuuucagagccaccagaauu

SEQ ID NO: 2270 - RNA, 1558 nt, Artificial Sequence
  mRNA product Design a-2 comprising derived and/or modified sequence from YFV__NC_002031.1__eSS-NS1-Y (polyprotein: aa758-1177) (wt)
gggagaguccgcucagccagguugcagaagcggcuuagcguguguccuaaucuucucucugcguguagguaggccugugccgcaaacaagcuuaccauguccaugagcaugaucuugguaggagugaucaugauguuuuugucucuaggaguuggggcggaucaaggaugcgccaucaacuuuggcaagagagagcucaagugcggagaugguaucuucauauuuagagacucugaugacuggcugaacaaguacucauacuauccagaagauccugugaagcuugcaucaauagugaaagccucuuuugaagaagggaaguguggccuaaauucaguugacucccuugagcaugagauguggagaagcagggcagaugagaucaaugccauuuuugaggaaaacgagguggacauuucuguugucgugcaggauccaaagaauguuuaccagagaggaacucauccauuuuccagaauucgggauggucugcaguaugguuggaagacuugggguaagaaccuuguguucuccccagggaggaagaauggaagcuucaucauagauggaaaguccaggaaagaaugcccguuuucaaaccgggucuggaauucuuuccagauagaggaguuugggacgggaguguucaccacacgcguguacauggacgcagucuuugaauacaccauagacugcgauggaucuaucuugggugcagcggugaacggaaaaaagagugcccauggcucuccaacauuuuggaugggaagucaugaaguaaaugggacauggaugauccacaccuuggaggcauuagauuacaaggagugugaguggccacugacacauacgauuggaacaucaguugaagagagugaaauguucaugccgagaucaaucggaggcccaguuagcucucacaaucauaucccuggauacaagguucagacgaacggaccuuggaugcagguaccacuagaagugaagagagaagcuugcccagggacuagcgugaucauugauggcaacugugauggacggggaaaaucaaccagauccaccacggauagcgggaaaguuauuccugaaugguguugccgcuccugcacaaugccgccugugagcuuccaugguagugauggguguugguaucccauggaaauuaggccaaggaaaacgcaugaaagccaucuggugcgcuccuggguuacagcuggagaaauacaugcugucccuuuugguuuggugagcaugaugauagcaauggaagugguccuaaggaaaagacagggaccaaagcaaauguugguuggaggaguagugcucuugggagcaaugcuggucgggcaaguaacuugaggacuagucccuguucccagagcccacuuuuuuuucuuuuuuugaaauaaaauagccugucuuucagaucuaaaaaaaaaaaaaaaaaaaaaaaaaaaaaaaaaaaaaaaaaaaaaaaaaaaaaaaaaaaaaaaaugcaucccccccccccccccccccccccccccccccaaaggcucuuuucagagccaccagaauu

SEQ ID NO: 2271 - RNA, 1417 nt, Artificial Sequence
  mRNA product Design a-2 comprising derived and/or modified sequence from YFV__NC_002031.1__eSS-NS1 (polyprotein: aa758-1130) (wt)
gggagaguccgcucagccagguugcagaagcggcuuagcguguguccuaaucuucucucugcguguagguaggccugugccgcaaacaagcuuaccauguccaugagcaugaucuugguaggagugaucaugauguuuuugucucuaggaguuggggcggaucaaggaugcgccaucaacuuuggcaagagagagcucaagugcggagaugguaucuucauauuuagagacucugaugacuggcugaacaaguacucauacuauccagaagauccugugaagcuugcaucaauagugaaagccucuuuugaagaagggaaguguggccuaaauucaguugacucccuugagcaugagauguggagaagcagggcagaugagaucaaugccauuuuugaggaaaacgagguggacauuucuguugucgugcaggauccaaagaauguuuaccagagaggaacucauccauuuuccagaauucgggauggucugcaguaugguuggaagacuugggguaagaaccuuguguucuccccagggaggaagaauggaagcuucaucauagauggaaaguccaggaaagaaugcccguuuucaaaccgggucuggaauucuuuccagauagaggaguuugggacgggaguguucaccacacgcguguacauggacgcagucuuugaauacaccauagacugcgauggaucuaucuugggugcagcggugaacggaaaaaagagugcccauggcucuccaacauuuuggaugggaagucaugaaguaaaugggacauggaugauccacaccuuggaggcauuagauuacaaggagugugaguggccacugacacauacgauuggaacaucaguugaagagagugaaauguucaugccgagaucaaucggaggcccaguuagcucucacaaucauaucccuggauacaagguucagacgaacggaccuuggaugcagguaccacuagaagugaagagagaagcuugcccagggacuagcgugaucauugauggcaacugugauggacggggaaaaucaaccagauccaccacggauagcgggaaaguuauuccugaaugguguugccgcuccugcacaaugccgccugugagcuuccaugguagugauggguguugguaucccauggaaauuaggccaaggaaaacgcaugaaagccaucuggugcgcuccuggguuacagcuugaggacuagucccuguucccagagcccacuuuuuuuucuuuuuuugaaauaaaauagccugucuuucagaucuaaaaaaaaaaaaaaaaaaaaaaaaaaaaaaaaaaaaaaaaaaaaaaaaaaaaaaaaaaaaaaaaugcaucccccccccccccccccccccccccccccccaaaggcucuuuucagagccaccagaauu

SEQ ID NO: 2272 - RNA, 1408 nt, Artificial Sequence
  mRNA product Design a-2 comprising derived and/or modified sequence from YFV__NC_002031.1__SSIgE-NS1 (polyprotein: aa779-1130) (wt)
gggagaguccgcucagccagguugcagaagcggcuuagcguguguccuaaucuucucucugcguguagguaggccugugccgcaaacaagcuuaccauggacuggaccuggauccuguuccucguggccgccgcgacccgcguccacagcgaucaaggaugcgccaucaacuuuggcaagagagagcucaagugcggagaugguaucuucauauuuagagacucugaugacuggcugaacaaguacucauacuauccagaagauccugugaagcuugcaucaauagugaaagccucuuuugaagaagggaaguguggccuaaauucaguugacucccuugagcaugagauguggagaagcagggcagaugagaucaaugccauuuuugaggaaaacgagguggacauuucuguugucgugcaggauccaaagaauguuuaccagagaggaacucauccauuuuccagaauucgggauggucugcaguaugguuggaagacuugggguaagaaccuuguguucuccccagggaggaagaauggaagcuucaucauagauggaaaguccaggaaagaaugcccguuuucaaaccgggucuggaauucuuuccagauagaggaguuugggacgggaguguucaccacacgcguguacauggacgcagucuuugaauacaccauagacugcgauggaucuaucuugggugcagcggugaacggaaaaaagagugcccauggcucuccaacauuuuggaugggaagucaugaaguaaaugggacauggaugauccacaccuuggaggcauuagauuacaaggagugugaguggccacugacacauacgauuggaacaucaguugaagagagugaaauguucaugccgagaucaaucggaggcccaguuagcucucacaaucauaucccuggauacaagguucagacgaacggaccuuggaugcagguaccacuagaagugaagagagaagcuugcccagggacuagcgugaucauugauggcaacugugauggacggggaaaaucaaccagauccaccacggauagcgggaaaguuauuccugaaugguguugccgcuccugcacaaugccgccugugagcuuccaugguagugauggguguugguaucccauggaaauuaggccaaggaaaacgcaugaaagccaucuggugcgcuccuggguuacagcuugaggacuagucccuguucccagagcccacuuuuuuuucuuuuuuugaaauaaaauagccugucuuucagaucuaaaaaaaaaaaaaaaaaaaaaaaaaaaaaaaaaaaaaaaaaaaaaaaaaaaaaaaaaaaaaaaaugcaucccccccccccccccccccccccccccccccaaaggcucuuuucagagccaccagaauu

SEQ ID NO: 2273 - RNA, 1558 nt, Artificial Sequence
  mRNA product Design a-2 comprising derived and/or modified sequence from YFV__NC_002031.1__eSS-NS1-Y (polyprotein: aa758-1177) (opt1)
gggagaguccgcucagccagguugcagaagcggcuuagcguguguccuaaucuucucucugcguguagguaggccugugccgcaaacaagcuuaccaugagcauguccaugauccuggugggcgucaucaugauguuccucagccugggggugggcgccgaccaggggugcgccaucaacuucggcaagcgcgagcugaagugcggggacggcaucuucaucuuccgggacuccgacgacuggcucaacaaguacagcuacuaccccgaggacccggugaagcuggcguccaucgucaaggccagcuucgaggagggcaagugcgggcugaacuccguggacagccucgagcacgagauguggcgcucccgggccgacgagaucaacgccaucuucgaggagaacgagguggacaucagcgucguggugcaggaccccaagaacgucuaccagcgcggcacccaccccuucucccggauccgcgacgggcugcaguacggcuggaagaccugggggaagaaccugguguucagccccggccggaagaacggcuccuucaucaucgacggcaagagccgcaaggagugcccguucuccaaccggguguggaacagcuuccagaucgaggaguucgggacgggggucuucaccacccgcguguacauggacgccguguucgaguacaccaucgacugcgacggcuccauccucggcgcggccgucaacgggaagaaguccgcccacggcagccccacguucuggauggggagccacgaggugaacggcaccuggaugauccacacccuggaggcccuggacuacaaggagugcgaguggccccucacccacacgaucgggaccagcguggaggaguccgagauguucaugccccggagcaucggcggcccggucuccagccacaaccacauccccggguacaaggugcagaccaacggccccuggaugcaggucccccuggaggugaagcgcgaggcgugcccggggaccuccgugaucaucgacggcaacugcgacgggcggggcaagagcacgcgcuccaccaccgacagcggcaaggugauccccgaguggugcugccgguccugcaccaugccgcccgucagcuuccacggguccgacggcugcugguaccccauggagauccgcccccggaagacgcacgagagccaccuggugcgcuccugggucaccgccggggagauccacgccgugcccuucggccucgugagcaugaugaucgccauggaggucgugcugcggaagcgccaggggcccaagcagaugcuggugggcggcgucgugcuccugggggccaugcuggugggccaggucaccugaggacuagucccuguucccagagcccacuuuuuuuucuuuuuuugaaauaaaauagccugucuuucagaucuaaaaaaaaaaaaaaaaaaaaaaaaaaaaaaaaaaaaaaaaaaaaaaaaaaaaaaaaaaaaaaaaugcaucccccccccccccccccccccccccccccccaaaggcucuuuucagagccaccagaauu

SEQ ID NO: 2274 - RNA, 1417 nt, Artificial Sequence
  mRNA product Design a-2 comprising derived and/or modified sequence from YFV__NC_002031.1__eSS-NS1 (polyprotein: aa758-1130) (opt1)
gggagaguccgcucagccagguugcagaagcggcuuagcguguguccuaaucuucucucugcguguagguaggccugugccgcaaacaagcuuaccaugagcauguccaugauccuggugggcgucaucaugauguuccucagccugggggugggcgccgaccaggggugcgccaucaacuucggcaagcgcgagcugaagugcggggacggcaucuucaucuuccgggacuccgacgacuggcucaacaaguacagcuacuaccccgaggacccggugaagcuggcguccaucgucaaggccagcuucgaggagggcaagugcgggcugaacuccguggacagccucgagcacgagauguggcgcucccgggccgacgagaucaacgccaucuucgaggagaacgagguggacaucagcgucguggugcaggaccccaagaacgucuaccagcgcggcacccaccccuucucccggauccgcgacgggcugcaguacggcuggaagaccugggggaagaaccugguguucagccccggccggaagaacggcuccuucaucaucgacggcaagagccgcaaggagugcccguucuccaaccggguguggaacagcuuccagaucgaggaguucgggacgggggucuucaccacccgcguguacauggacgccguguucgaguacaccaucgacugcgacggcuccauccucggcgcggccgucaacgggaagaaguccgcccacggcagccccacguucuggauggggagccacgaggugaacggcaccuggaugauccacacccuggaggcccuggacuacaaggagugcgaguggccccucacccacacgaucgggaccagcguggaggaguccgagauguucaugccccggagcaucggcggcccggucuccagccacaaccacauccccggguacaaggugcagaccaacggccccuggaugcaggucccccuggaggugaagcgcgaggcgugcccggggaccuccgugaucaucgacggcaacugcgacgggcggggcaagagcacgcgcuccaccaccgacagcggcaaggugauccccgaguggugcugccgguccugcaccaugccgcccgucagcuuccacggguccgacggcugcugguaccccauggagauccgcccccggaagacgcacgagagccaccuggugcgcuccugggucaccgccugaggacuagucccuguucccagagcccacuuuuuuuucuuuuuuugaaauaaaauagccugucuuucagaucuaaaaaaaaaaaaaaaaaaaaaaaaaaaaaaaaaaaaaaaaaaaaaaaaaaaaaaaaaaaaaaaaugcaucccccccccccccccccccccccccccccccaaaggcucuuuucagagccaccagaauu

SEQ ID NO: 2275 - RNA, 1408 nt, Artificial Sequence
  mRNA product Design a-2 comprising derived and/or modified sequence from YFV__NC_002031.1__SSIgE-NS1 (polyprotein: aa779-1130) (opt1)
gggagaguccgcucagccagguugcagaagcggcuuagcguguguccuaaucuucucucugcguguagguaggccugugccgcaaacaagcuuaccauggacuggaccuggauccuguuccucguggccgccgcgacccgcguccacagcgaccaggggugcgccaucaacuucggcaagcgcgagcugaagugcggggacggcaucuucaucuuccgggacuccgacgacuggcucaacaaguacagcuacuaccccgaggacccggugaagcuggcguccaucgucaaggccagcuucgaggagggcaagugcgggcugaacuccguggacagccucgagcacgagauguggcgcucccgggccgacgagaucaacgccaucuucgaggagaacgagguggacaucagcgucguggugcaggaccccaagaacgucuaccagcgcggcacccaccccuucucccggauccgcgacgggcugcaguacggcuggaagaccugggggaagaaccugguguucagccccggccggaagaacggcuccuucaucaucgacggcaagagccgcaaggagugcccguucuccaaccggguguggaacagcuuccagaucgaggaguucgggacgggggucuucaccacccgcguguacauggacgccguguucgaguacaccaucgacugcgacggcuccauccucggcgcggccgucaacgggaagaaguccgcccacggcagccccacguucuggauggggagccacgaggugaacggcaccuggaugauccacacccuggaggcccuggacuacaaggagugcgaguggccccucacccacacgaucgggaccagcguggaggaguccgagauguucaugccccggagcaucggcggcccggucuccagccacaaccacauccccggguacaaggugcagaccaacggccccuggaugcaggucccccuggaggugaagcgcgaggcgugcccggggaccuccgugaucaucgacggcaacugcgacgggcggggcaagagcacgcgcuccaccaccgacagcggcaaggugauccccgaguggugcugccgguccugcaccaugccgcccgucagcuuccacggguccgacggcugcugguaccccauggagauccgcccccggaagacgcacgagagccaccuggugcgcuccugggucaccgccugaggacuagucccuguucccagagcccacuuuuuuuucuuuuuuugaaauaaaauagccugucuuucagaucuaaaaaaaaaaaaaaaaaaaaaaaaaaaaaaaaaaaaaaaaaaaaaaaaaaaaaaaaaaaaaaaaugcaucccccccccccccccccccccccccccccccaaaggcucuuuucagagccaccagaauu

SEQ ID NO: 2276 - RNA, 1558 nt, Artificial Sequence
  mRNA product Design a-2 comprising derived and/or modified sequence from YFV__NC_002031.1__eSS-NS1-Y (polyprotein: aa758-1177) (opt2)
gggagaguccgcucagccagguugcagaagcggcuuagcguguguccuaaucuucucucugcguguagguaggccugugccgcaaacaagcuuaccauguccauguccaugauccucgucggcgucaucaugauguuccucucccucggcgucggcgccgaccagggcugcgccaucaacuucggcaagcgcgagcucaagugcggcgacggcaucuucaucuuccgcgacuccgacgacuggcucaacaaguacuccuacuaccccgaggaccccgucaagcucgccuccaucgucaaggccuccuucgaggagggcaagugcggccucaacuccgucgacucccucgagcacgagauguggcgcucccgcgccgacgagaucaacgccaucuucgaggagaacgaggucgacaucuccgucgucguccaggaccccaagaacgucuaccagcgcggcacccaccccuucucccgcauccgcgacggccuccaguacggcuggaagaccuggggcaagaaccucgucuucucccccggccgcaagaacggcuccuucaucaucgacggcaagucccgcaaggagugccccuucuccaaccgcgucuggaacuccuuccagaucgaggaguucggcaccggcgucuucaccacccgcgucuacauggacgccgucuucgaguacaccaucgacugcgacggcuccauccucggcgccgccgucaacggcaagaaguccgcccacggcucccccaccuucuggaugggcucccacgaggucaacggcaccuggaugauccacacccucgaggcccucgacuacaaggagugcgaguggccccucacccacaccaucggcaccuccgucgaggaguccgagauguucaugccccgcuccaucggcggccccgucuccucccacaaccacauccccggcuacaagguccagaccaacggccccuggaugcaggucccccucgaggucaagcgcgaggccugccccggcaccuccgucaucaucgacggcaacugcgacggccgcggcaaguccacccgcuccaccaccgacuccggcaaggucauccccgaguggugcugccgcuccugcaccaugccccccgucuccuuccacggcuccgacggcugcugguaccccauggagauccgcccccgcaagacccacgagucccaccucguccgcuccugggucaccgccggcgagauccacgccguccccuucggccucgucuccaugaugaucgccauggaggucguccuccgcaagcgccagggccccaagcagaugcucgucggcggcgucguccuccucggcgccaugcucgucggccaggucaccugaggacuagucccuguucccagagcccacuuuuuuuucuuuuuuugaaauaaaauagccugucuuucagaucuaaaaaaaaaaaaaaaaaaaaaaaaaaaaaaaaaaaaaaaaaaaaaaaaaaaaaaaaaaaaaaaaugcaucccccccccccccccccccccccccccccccaaaggcucuuuucagagccaccagaauu

SEQ ID NO: 2277 - RNA, 1417 nt, Artificial Sequence
  mRNA product Design a-2 comprising derived and/or modified sequence from YFV__NC_002031.1__eSS-NS1 (polyprotein: aa758-1130) (opt2)
gggagaguccgcucagccagguugcagaagcggcuuagcguguguccuaaucuucucucugcguguagguaggccugugccgcaaacaagcuuaccauguccauguccaugauccucgucggcgucaucaugauguuccucucccucggcgucggcgccgaccagggcugcgccaucaacuucggcaagcgcgagcucaagugcggcgacggcaucuucaucuuccgcgacuccgacgacuggcucaacaaguacuccuacuaccccgaggaccccgucaagcucgccuccaucgucaaggccuccuucgaggagggcaagugcggccucaacuccgucgacucccucgagcacgagauguggcgcucccgcgccgacgagaucaacgccaucuucgaggagaacgaggucgacaucuccgucgucguccaggaccccaagaacgucuaccagcgcggcacccaccccuucucccgcauccgcgacggccuccaguacggcuggaagaccuggggcaagaaccucgucuucucccccggccgcaagaacggcuccuucaucaucgacggcaagucccgcaaggagugccccuucuccaaccgcgucuggaacuccuuccagaucgaggaguucggcaccggcgucuucaccacccgcgucuacauggacgccgucuucgaguacaccaucgacugcgacggcuccauccucggcgccgccgucaacggcaagaaguccgcccacggcucccccaccuucuggaugggcucccacgaggucaacggcaccuggaugauccacacccucgaggcccucgacuacaaggagugcgaguggccccucacccacaccaucggcaccuccgucgaggaguccgagauguucaugccccgcuccaucggcggccccgucuccucccacaaccacauccccggcuacaagguccagaccaacggccccuggaugcaggucccccucgaggucaagcgcgaggccugccccggcaccuccgucaucaucgacggcaacugcgacggccgcggcaaguccacccgcuccaccaccgacuccggcaaggucauccccgaguggugcugccgcuccugcaccaugccccccgucuccuuccacggcuccgacggcugcugguaccccauggagauccgcccccgcaagacccacgagucccaccucguccgcuccugggucaccgccugaggacuagucccuguucccagagcccacuuuuuuuucuuuuuuugaaauaaaauagccugucuuucagaucuaaaaaaaaaaaaaaaaaaaaaaaaaaaaaaaaaaaaaaaaaaaaaaaaaaaaaaaaaaaaaaaaugcaucccccccccccccccccccccccccccccccaaaggcucuuuucagagccaccagaauu

SEQ ID NO: 2278 - RNA, 1408 nt, Artificial Sequence
  mRNA product Design a-2 comprising derived and/or modified sequence from YFV__NC_002031.1__SSIgE-NS1 (polyprotein: aa779-1130) (opt2)
gggagaguccgcucagccagguugcagaagcggcuuagcguguguccuaaucuucucucugcguguagguaggccugugccgcaaacaagcuuaccauggacuggaccuggauccucuuccucgucgccgccgccacccgcguccacuccgaccagggcugcgccaucaacuucggcaagcgcgagcucaagugcggcgacggcaucuucaucuuccgcgacuccgacgacuggcucaacaaguacuccuacuaccccgaggaccccgucaagcucgccuccaucgucaaggccuccuucgaggagggcaagugcggccucaacuccgucgacucccucgagcacgagauguggcgcucccgcgccgacgagaucaacgccaucuucgaggagaacgaggucgacaucuccgucgucguccaggaccccaagaacgucuaccagcgcggcacccaccccuucucccgcauccgcgacggccuccaguacggcuggaagaccuggggcaagaaccucgucuucucccccggccgcaagaacggcuccuucaucaucgacggcaagucccgcaaggagugccccuucuccaaccgcgucuggaacuccuuccagaucgaggaguucggcaccggcgucuucaccacccgcgucuacauggacgccgucuucgaguacaccaucgacugcgacggcuccauccucggcgccgccgucaacggcaagaaguccgcccacggcucccccaccuucuggaugggcucccacgaggucaacggcaccuggaugauccacacccucgaggcccucgacuacaaggagugcgaguggccccucacccacaccaucggcaccuccgucgaggaguccgagauguucaugccccgcuccaucggcggccccgucuccucccacaaccacauccccggcuacaagguccagaccaacggccccuggaugcaggucccccucgaggucaagcgcgaggccugccccggcaccuccgucaucaucgacggcaacugcgacggccgcggcaaguccacccgcuccaccaccgacuccggcaaggucauccccgaguggugcugccgcuccugcaccaugccccccgucuccuuccacggcuccgacggcugcugguaccccauggagauccgcccccgcaagacccacgagucccaccucguccgcuccugggucaccgccugaggacuagucccuguucccagagcccacuuuuuuuucuuuuuuugaaauaaaauagccugucuuucagaucuaaaaaaaaaaaaaaaaaaaaaaaaaaaaaaaaaaaaaaaaaaaaaaaaaaaaaaaaaaaaaaaaugcaucccccccccccccccccccccccccccccccaaaggcucuuuucagagccaccagaauu

SEQ ID NO: 2279 - RNA, 1558 nt, Artificial Sequence
  mRNA product Design a-2 comprising derived and/or modified sequence from YFV__NC_002031.1__eSS-NS1-Y (polyprotein: aa758-1177) (opt3)
gggagaguccgcucagccagguugcagaagcggcuuagcguguguccuaaucuucucucugcguguagguaggccugugccgcaaacaagcuuaccaugagcauguccaugauccuggugggcgucauuaugauguuccucucucuugggguuggagccgaccaggguugcgcuauaaacuuuggcaagagagagcugaaauguggggauggaaucuucauuuuuagggacucagaugacugguugaauaaguacaguuauuaccccgaagauccugugaaauuagcaagcaucguaaaggccuccuucgaggaaggcaaaugcggucugaacucuguggacucgcuagagcacgaaauguggcggucacgcgcggaugagauuaaugcuaucuuugaggaaaacgaggucgacauaagcgugguugugcaagauccaaagaaugucuaucagcgagggacccauccguucagucguaucagagacggacuccaguacggcuggaagacauggggcaaaaaccugguguuuucccccgggaggaagaauggaucuuucauuaucgaugguaaaagccggaaggaauguccuuuuuccaaccgcguauggaacucauuccagauugaggaguuuggcacugggguuuucacgaccagaguguauauggacgccgucuuugaauacacaaucgauugcgacggaaguauacuuggcgcagccgugaaugguaaaaagagcgcucacgggucuccaacuuucuggaugggaucccaugaggugaauggcaccuggaugauucacacacuggaagcauuggacuauaaggagugugaauggccccucacccauacuaucggcacaucagucgaggagagcgaaauguucaugccuaggaguauugggggaccaguuucuucccacaaccacauccccgguuacaaagugcaaaccaauggcccuuggaugcagguaccacuggaggugaagcgggaagccugcccggggacgagcgucaucauugauggaaacugugacggccgcgguaaaucgacucgaucuaccacagauuccgggaaggugauacccgaguggugcuguagaucaugcacuaugccuccaguuaguuuucauggcagcgacggauguugguaccccauggaaaucaggccucggaaaacccacgagucccaucuggugcguucuugggucacagcuggcgagauucacgccgugccauucgggcucguaagcaugaugaucgcgauggaaguuguguuacgcaagagacagggacccaaacagaugcuggucgguggcgugguccuuuugggggcaaugcuggugggacaaguuaccugaggacuagucccuguucccagagcccacuuuuuuuucuuuuuuugaaauaaaauagccugucuuucagaucuaaaaaaaaaaaaaaaaaaaaaaaaaaaaaaaaaaaaaaaaaaaaaaaaaaaaaaaaaaaaaaaaugcaucccccccccccccccccccccccccccccccaaaggcucuuuucagagccaccagaauu

SEQ ID NO: 2280 - RNA, 1417 nt, Artificial Sequence
  mRNA product Design a-2 comprising derived and/or modified sequence from YFV__NC_002031.1__eSS-NS1 (polyprotein: aa758-1130) (opt3)
gggagaguccgcucagccagguugcagaagcggcuuagcguguguccuaaucuucucucugcguguagguaggccugugccgcaaacaagcuuaccaugagcauguccaugauccuggugggcgucauuaugauguuccucucucuugggguuggagccgaccaggguugcgcuauaaacuuuggcaagagagagcugaaauguggggauggaaucuucauuuuuagggacucagaugacugguugaauaaguacaguuauuaccccgaagauccugugaaauuagcaagcaucguaaaggccuccuucgaggaaggcaaaugcggucugaacucuguggacucgcuagagcacgaaauguggcggucacgcgcggaugagauuaaugcuaucuuugaggaaaacgaggucgacauaagcgugguugugcaagauccaaagaaugucuaucagcgagggacccauccguucagucguaucagagacggacuccaguacggcuggaagacauggggcaaaaaccugguguuuucccccgggaggaagaauggaucuuucauuaucgaugguaaaagccggaaggaauguccuuuuuccaaccgcguauggaacucauuccagauugaggaguuuggcacugggguuuucacgaccagaguguauauggacgccgucuuugaauacacaaucgauugcgacggaaguauacuuggcgcagccgugaaugguaaaaagagcgcucacgggucuccaacuuucuggaugggaucccaugaggugaauggcaccuggaugauucacacacuggaagcauuggacuauaaggagugugaauggccccucacccauacuaucggcacaucagucgaggagagcgaaauguucaugccuaggaguauugggggaccaguuucuucccacaaccacauccccgguuacaaagugcaaaccaauggcccuuggaugcagguaccacuggaggugaagcgggaagccugcccggggacgagcgucaucauugauggaaacugugacggccgcgguaaaucgacucgaucuaccacagauuccgggaaggugauacccgaguggugcuguagaucaugcacuaugccuccaguuaguuuucauggcagcgacggauguugguaccccauggaaaucaggccucggaaaacccacgagucccaucuggugcguucuugggucacagcuugaggacuagucccuguucccagagcccacuuuuuuuucuuuuuuugaaauaaaauagccugucuuucagaucuaaaaaaaaaaaaaaaaaaaaaaaaaaaaaaaaaaaaaaaaaaaaaaaaaaaaaaaaaaaaaaaaugcaucccccccccccccccccccccccccccccccaaaggcucuuuucagagccaccagaauu

SEQ ID NO: 2281 - RNA, 1408 nt, Artificial Sequence
  mRNA product Design a-2 comprising derived and/or modified sequence from YFV__NC_002031.1__SSIgE-NS1 (polyprotein: aa779-1130) (opt3)
gggagaguccgcucagccagguugcagaagcggcuuagcguguguccuaaucuucucucugcguguagguaggccugugccgcaaacaagcuuaccauggacuggaccuggauccuguuccucguggccgcugcaacaagaguccacagcgaccaggguugcgcuauaaacuuuggcaagagagagcugaaauguggggauggaaucuucauuuuuagggacucagaugacugguugaauaaguacaguuauuaccccgaagauccugugaaauuagcaagcaucguaaaggccuccuucgaggaaggcaaaugcggucugaacucuguggacucgcuagagcacgaaauguggcggucacgcgcggaugagauuaaugcuaucuuugaggaaaacgaggucgacauaagcgugguugugcaagauccaaagaaugucuaucagcgagggacccauccguucagucguaucagagacggacuccaguacggcuggaagacauggggcaaaaaccugguguuuucccccgggaggaagaauggaucuuucauuaucgaugguaaaagccggaaggaauguccuuuuuccaaccgcguauggaacucauuccagauugaggaguuuggcacugggguuuucacgaccagaguguauauggacgccgucuuugaauacacaaucgauugcgacggaaguauacuuggcgcagccgugaaugguaaaaagagcgcucacgggucuccaacuuucuggaugggaucccaugaggugaauggcaccuggaugauucacacacuggaagcauuggacuauaaggagugugaauggccccucacccauacuaucggcacaucagucgaggagagcgaaauguucaugccuaggaguauugggggaccaguuucuucccacaaccacauccccgguuacaaagugcaaaccaauggcccuuggaugcagguaccacuggaggugaagcgggaagccugcccggggacgagcgucaucauugauggaaacugugacggccgcgguaaaucgacucgaucuaccacagauuccgggaaggugauacccgaguggugcuguagaucaugcacuaugccuccaguuaguuuucauggcagcgacggauguugguaccccauggaaaucaggccucggaaaacccacgagucccaucuggugcguucuugggucacagcuugaggacuagucccuguucccagagcccacuuuuuuuucuuuuuuugaaauaaaauagccugucuuucagaucuaaaaaaaaaaaaaaaaaaaaaaaaaaaaaaaaaaaaaaaaaaaaaaaaaaaaaaaaaaaaaaaaugcaucccccccccccccccccccccccccccccccaaaggcucuuuucagagccaccagaauu

SEQ ID NO: 2282 - RNA, 1558 nt, Artificial Sequence
  mRNA product Design a-2 comprising derived and/or modified sequence from YFV__NC_002031.1__eSS-NS1-Y (polyprotein: aa758-1177) (opt4)
gggagaguccgcucagccagguugcagaagcggcuuagcguguguccuaaucuucucucugcguguagguaggccugugccgcaaacaagcuuaccaugagcaugagcaugauccuggugggcgugaucaugauguuccugagccugggcgugggcgccgaccagggcugcgccaucaacuucggcaagagagagcugaagugcggcgacggcaucuucaucuucagagacagcgacgacuggcugaacaaguacagcuacuaccccgaggaccccgugaagcuggccagcaucgugaaggccagcuucgaggagggcaagugcggccugaacagcguggacagccuggagcacgagauguggagaagcagagccgacgagaucaacgccaucuucgaggagaacgagguggacaucagcgugguggugcaggaccccaagaacguguaccagagaggcacccaccccuucagcagaaucagagacggccugcaguacggcuggaagaccuggggcaagaaccugguguucagccccggcagaaagaacggcagcuucaucaucgacggcaagagcagaaaggagugccccuucagcaacagaguguggaacagcuuccagaucgaggaguucggcaccggcguguucaccaccagaguguacauggacgccguguucgaguacaccaucgacugcgacggcagcauccugggcgccgccgugaacggcaagaagagcgcccacggcagccccaccuucuggaugggcagccacgaggugaacggcaccuggaugauccacacccuggaggcccuggacuacaaggagugcgaguggccccugacccacaccaucggcaccagcguggaggagagcgagauguucaugcccagaagcaucggcggccccgugagcagccacaaccacauccccggcuacaaggugcagaccaacggccccuggaugcaggugccccuggaggugaagagagaggccugccccggcaccagcgugaucaucgacggcaacugcgacggcagaggcaagagcaccagaagcaccaccgacagcggcaaggugauccccgaguggugcugcagaagcugcaccaugccccccgugagcuuccacggcagcgacggcugcugguaccccauggagaucagacccagaaagacccacgagagccaccuggugagaagcugggugaccgccggcgagauccacgccgugcccuucggccuggugagcaugaugaucgccauggagguggugcugagaaagagacagggccccaagcagaugcuggugggcggcguggugcugcugggcgccaugcuggugggccaggugaccugaggacuagucccuguucccagagcccacuuuuuuuucuuuuuuugaaauaaaauagccugucuuucagaucuaaaaaaaaaaaaaaaaaaaaaaaaaaaaaaaaaaaaaaaaaaaaaaaaaaaaaaaaaaaaaaaaugcaucccccccccccccccccccccccccccccccaaaggcucuuuucagagccaccagaauu

SEQ ID NO: 2283 - RNA, 1417 nt, Artificial Sequence
  mRNA product Design a-2 comprising derived and/or modified sequence from YFV__NC_002031.1__eSS-NS1 (polyprotein: aa758-1130) (opt4)
gggagaguccgcucagccagguugcagaagcggcuuagcguguguccuaaucuucucucugcguguagguaggccugugccgcaaacaagcuuaccaugagcaugagcaugauccuggugggcgugaucaugauguuccugagccugggcgugggcgccgaccagggcugcgccaucaacuucggcaagagagagcugaagugcggcgacggcaucuucaucuucagagacagcgacgacuggcugaacaaguacagcuacuaccccgaggaccccgugaagcuggccagcaucgugaaggccagcuucgaggagggcaagugcggccugaacagcguggacagccuggagcacgagauguggagaagcagagccgacgagaucaacgccaucuucgaggagaacgagguggacaucagcgugguggugcaggaccccaagaacguguaccagagaggcacccaccccuucagcagaaucagagacggccugcaguacggcuggaagaccuggggcaagaaccugguguucagccccggcagaaagaacggcagcuucaucaucgacggcaagagcagaaaggagugccccuucagcaacagaguguggaacagcuuccagaucgaggaguucggcaccggcguguucaccaccagaguguacauggacgccguguucgaguacaccaucgacugcgacggcagcauccugggcgccgccgugaacggcaagaagagcgcccacggcagccccaccuucuggaugggcagccacgaggugaacggcaccuggaugauccacacccuggaggcccuggacuacaaggagugcgaguggccccugacccacaccaucggcaccagcguggaggagagcgagauguucaugcccagaagcaucggcggccccgugagcagccacaaccacauccccggcuacaaggugcagaccaacggccccuggaugcaggugccccuggaggugaagagagaggccugccccggcaccagcgugaucaucgacggcaacugcgacggcagaggcaagagcaccagaagcaccaccgacagcggcaaggugauccccgaguggugcugcagaagcugcaccaugccccccgugagcuuccacggcagcgacggcugcugguaccccauggagaucagacccagaaagacccacgagagccaccuggugagaagcugggugaccgccugaggacuagucccuguucccagagcccacuuuuuuuucuuuuuuugaaauaaaauagccugucuuucagaucuaaaaaaaaaaaaaaaaaaaaaaaaaaaaaaaaaaaaaaaaaaaaaaaaaaaaaaaaaaaaaaaaugcaucccccccccccccccccccccccccccccccaaaggcucuuuucagagccaccagaauu

SEQ ID NO: 2284 - RNA, 1408 nt, Artificial Sequence
  mRNA product Design a-2 comprising derived and/or modified sequence from YFV__NC_002031.1__SSIgE-NS1 (polyprotein: aa779-1130) (opt4)
gggagaguccgcucagccagguugcagaagcggcuuagcguguguccuaaucuucucucugcguguagguaggccugugccgcaaacaagcuuaccauggacuggaccuggauccuguuccugguggccgccgccaccagagugcacagcgaccagggcugcgccaucaacuucggcaagagagagcugaagugcggcgacggcaucuucaucuucagagacagcgacgacuggcugaacaaguacagcuacuaccccgaggaccccgugaagcuggccagcaucgugaaggccagcuucgaggagggcaagugcggccugaacagcguggacagccuggagcacgagauguggagaagcagagccgacgagaucaacgccaucuucgaggagaacgagguggacaucagcgugguggugcaggaccccaagaacguguaccagagaggcacccaccccuucagcagaaucagagacggccugcaguacggcuggaagaccuggggcaagaaccugguguucagccccggcagaaagaacggcagcuucaucaucgacggcaagagcagaaaggagugccccuucagcaacagaguguggaacagcuuccagaucgaggaguucggcaccggcguguucaccaccagaguguacauggacgccguguucgaguacaccaucgacugcgacggcagcauccugggcgccgccgugaacggcaagaagagcgcccacggcagccccaccuucuggaugggcagccacgaggugaacggcaccuggaugauccacacccuggaggcccuggacuacaaggagugcgaguggccccugacccacaccaucggcaccagcguggaggagagcgagauguucaugcccagaagcaucggcggccccgugagcagccacaaccacauccccggcuacaaggugcagaccaacggccccuggaugcaggugccccuggaggugaagagagaggccugccccggcaccagcgugaucaucgacggcaacugcgacggcagaggcaagagcaccagaagcaccaccgacagcggcaaggugauccccgaguggugcugcagaagcugcaccaugccccccgugagcuuccacggcagcgacggcugcugguaccccauggagaucagacccagaaagacccacgagagccaccuggugagaagcugggugaccgccugaggacuagucccuguucccagagcccacuuuuuuuucuuuuuuugaaauaaaauagccugucuuucagaucuaaaaaaaaaaaaaaaaaaaaaaaaaaaaaaaaaaaaaaaaaaaaaaaaaaaaaaaaaaaaaaaaugcaucccccccccccccccccccccccccccccccaaaggcucuuuucagagccaccagaauu

SEQ ID NO: 2285 - RNA, 1558 nt, Artificial Sequence
  mRNA product Design a-2 comprising derived and/or modified sequence from YFV__NC_002031.1__eSS-NS1-Y (polyprotein: aa758-1177) (opt5)
gggagaguccgcucagccagguugcagaagcggcuuagcguguguccuaaucuucucucugcguguagguaggccugugccgcaaacaagcuuaccaugagcauguccaugauccuggugggcgucauuaugauguuccucucucuggggguuggagccgaccagggcugcgcuaucaacuuugggaagagagagcuuaaauguggagauggcauuuucaucuuucgggacagcgaugacuggcugaauaaguacuccuauuaccccgaagauccugugaaacucgccucuauugugaaggcgagcuucgaggaagggaaaugcggacugaacuccgucgacucucuugagcacgaaauguggcgcagcagagcugaugagaucaaugccaucuuugaggaaaacgagguggacauuuccguugugguccaagauccgaagaauguguaucagcggggcacccaucccuucagccgcaucagagacggccugcaguacggguggaagacauggggcaaaaaccucguguuuucuccuggacggaagaauggguccuucauuaucgauggaaaaagccgcaaggaaugucccuuuucuaacagaguguggaacuccuuccagauugaggaguuuggcacgggggucuucaccacacggguguauauggacgccguguuugaauacaccaucgauugcgacggaagcauucugggcgcugccgucaauggcaaaaagucugcucacggguccccuacauucuggaugggaagccaugagguuaauggcaccuggaugauccacacacuggaagcccucgacuauaaggagugugaauggccccugacccauacgaucgggaccuccguggaggagucugaaauguucaugccucgcagcauuggaggcccgguguccagccacaaccacauccccggguacaaaguccaaacaaauggaccuuggaugcagguuccccuugagguuaagagagaagcgugcccuggcaccucugugauuaucgauggcaacugugacgggcggggaaaauccacacgcagcaccacggauucuggcaaggucauucccgaguggugcuguagaagcugcacaaugccgccuguguccuuucaugggucugacggauguugguaccccauggaaauccggccucgcaaaacccacgagagccaucugguuagauccugggugacagccggcgagauccacgcuguccccuucgggcucgugagcaugaugauugccauggaagucgugcugcggaagagacagggccccaaacagaugcuuguuggaggcgugguccugcucggggcuaugcuggugggacaaguuaccugaggacuagucccuguucccagagcccacuuuuuuuucuuuuuuugaaauaaaauagccugucuuucagaucuaaaaaaaaaaaaaaaaaaaaaaaaaaaaaaaaaaaaaaaaaaaaaaaaaaaaaaaaaaaaaaaaugcaucccccccccccccccccccccccccccccccaaaggcucuuuucagagccaccagaauu

SEQ ID NO: 2286 - RNA, 1417 nt, Artificial Sequence
  mRNA product Design a-2 comprising derived and/or modified sequence from YFV__NC_002031.1__eSS-NS1 (polyprotein: aa758-1130) (opt5)
gggagaguccgcucagccagguugcagaagcggcuuagcguguguccuaaucuucucucugcguguagguaggccugugccgcaaacaagcuuaccaugagcauguccaugauccuggugggcgucauuaugauguuccucucucuggggguuggagccgaccagggcugcgcuaucaacuuugggaagagagagcuuaaauguggagauggcauuuucaucuuucgggacagcgaugacuggcugaauaaguacuccuauuaccccgaagauccugugaaacucgccucuauugugaaggcgagcuucgaggaagggaaaugcggacugaacuccgucgacucucuugagcacgaaauguggcgcagcagagcugaugagaucaaugccaucuuugaggaaaacgagguggacauuuccguugugguccaagauccgaagaauguguaucagcggggcacccaucccuucagccgcaucagagacggccugcaguacggguggaagacauggggcaaaaaccucguguuuucuccuggacggaagaauggguccuucauuaucgauggaaaaagccgcaaggaaugucccuuuucuaacagaguguggaacuccuuccagauugaggaguuuggcacgggggucuucaccacacggguguauauggacgccguguuugaauacaccaucgauugcgacggaagcauucugggcgcugccgucaauggcaaaaagucugcucacggguccccuacauucuggaugggaagccaugagguuaauggcaccuggaugauccacacacuggaagcccucgacuauaaggagugugaauggccccugacccauacgaucgggaccuccguggaggagucugaaauguucaugccucgcagcauuggaggcccgguguccagccacaaccacauccccggguacaaaguccaaacaaauggaccuuggaugcagguuccccuugagguuaagagagaagcgugcccuggcaccucugugauuaucgauggcaacugugacgggcggggaaaauccacacgcagcaccacggauucuggcaaggucauucccgaguggugcuguagaagcugcacaaugccgccuguguccuuucaugggucugacggauguugguaccccauggaaauccggccucgcaaaacccacgagagccaucugguuagauccugggugacagccugaggacuagucccuguucccagagcccacuuuuuuuucuuuuuuugaaauaaaauagccugucuuucagaucuaaaaaaaaaaaaaaaaaaaaaaaaaaaaaaaaaaaaaaaaaaaaaaaaaaaaaaaaaaaaaaaaugcaucccccccccccccccccccccccccccccccaaaggcucuuuucagagccaccagaauu

SEQ ID NO: 2287 - RNA, 1408 nt, Artificial Sequence
  mRNA product Design a-2 comprising derived and/or modified sequence from YFV__NC_002031.1__SSIgE-NS1 (polyprotein: aa779-1130) (opt5)
gggagaguccgcucagccagguugcagaagcggcuuagcguguguccuaaucuucucucugcguguagguaggccugugccgcaaacaagcuuaccauggacuggaccuggauccuguuccucguggccgcugccacaagaguccacagcgaccagggcugcgcuaucaacuuugggaagagagagcuuaaauguggagauggcauuuucaucuuucgggacagcgaugacuggcugaauaaguacuccuauuaccccgaagauccugugaaacucgccucuauugugaaggcgagcuucgaggaagggaaaugcggacugaacuccgucgacucucuugagcacgaaauguggcgcagcagagcugaugagaucaaugccaucuuugaggaaaacgagguggacauuuccguugugguccaagauccgaagaauguguaucagcggggcacccaucccuucagccgcaucagagacggccugcaguacggguggaagacauggggcaaaaaccucguguuuucuccuggacggaagaauggguccuucauuaucgauggaaaaagccgcaaggaaugucccuuuucuaacagaguguggaacuccuuccagauugaggaguuuggcacgggggucuucaccacacggguguauauggacgccguguuugaauacaccaucgauugcgacggaagcauucugggcgcugccgucaauggcaaaaagucugcucacggguccccuacauucuggaugggaagccaugagguuaauggcaccuggaugauccacacacuggaagcccucgacuauaaggagugugaauggccccugacccauacgaucgggaccuccguggaggagucugaaauguucaugccucgcagcauuggaggcccgguguccagccacaaccacauccccggguacaaaguccaaacaaauggaccuuggaugcagguuccccuugagguuaagagagaagcgugcccuggcaccucugugauuaucgauggcaacugugacgggcggggaaaauccacacgcagcaccacggauucuggcaaggucauucccgaguggugcuguagaagcugcacaaugccgccuguguccuuucaugggucugacggauguugguaccccauggaaauccggccucgcaaaacccacgagagccaucugguuagauccugggugacagccugaggacuagucccuguucccagagcccacuuuuuuuucuuuuuuugaaauaaaauagccugucuuucagaucuaaaaaaaaaaaaaaaaaaaaaaaaaaaaaaaaaaaaaaaaaaaaaaaaaaaaaaaaaaaaaaaaugcaucccccccccccccccccccccccccccccccaaaggcucuuuucagagccaccagaauu

SEQ ID NO: 2288 - RNA, 1558 nt, Artificial Sequence
  mRNA product Design a-2 comprising derived and/or modified sequence from YFV__NC_002031.1__eSS-NS1-Y (polyprotein: aa758-1177) (opt6)
gggagaguccgcucagccagguugcagaagcggcuuagcguguguccuaaucuucucucugcguguagguaggccugugccgcaaacaagcuuaccaugucaaugaguaugauauuaguagggguaauaaugauguuccuuagcuuaggaguaggagcagaucaaggaugugcaauaaauuuuggaaaaagagaacuaaaaugcggagacgguauauuuauauuuagagauagugaugauuggcuaaauaaauauaguuacuauccagaagauccaguuaaauuagccucaauaguaaaagcuagcuuugaagaaggaaaauguggacuaaauucaguagacagucuagaacacgaaauguggagaucaagggcagaugaaauaaaugcaaucuuugaagaaaaugaaguggauauaucagugguaguacaagauccaaaaaauguguaccaaagaggaacacauccauuuaguaggauaagagauggauuacaauauggauggaaaacauggggaaaaaauuuaguauuuaguccaggaagaaaaaauggaucauuuauaauagaugggaaaagccgaaaagaauguccauuuucaaacagaguauggaacucauuucaaauugaagaauuuggaacaggaguauuuacaacaagaguauauauggaugcaguauuugaauacaccauagauugugauggaaguauauuaggagcagcaguaaaugggaaaaaaagcgcucacggaaguccaacguuuuggaugggaucacacgagguaaauggcacguggaugauacauacuuuagaagcauuagauuacaaagaaugugaauggccauuaacucauacaauagguacaagcguagaagaaagugagauguuuaugccacguucaaucggggggccaguaucaagucauaaccauauaccaggauauaaaguacaaacgaauggaccuuggaugcaaguaccacuagaaguaaaacgagaagcaugcccaggaacgucaguaauaauagauggaaauugugauggcagggguaaaagcacaagaucaacaacagauucaggaaaaguaauaccugaaugguguuguagaaguuguacaaugccaccaguaucauuccauggaagugauggaugcugguauccaauggaaauuagaccaagaaaaacucaugaaagucauuuaguaagaucuuggguaacugcaggagaaauacaugcaguaccauuugguuuaguaaguaugaugauagcaauggaaguaguucuaagaaaaaggcaagggccuaaacaaaugcuagugggaggaguaguauugcuaggugcaauguuaguaggccaaguaaccugaggacuagucccuguucccagagcccacuuuuuuuucuuuuuuugaaauaaaauagccugucuuucagaucuaaaaaaaaaaaaaaaaaaaaaaaaaaaaaaaaaaaaaaaaaaaaaaaaaaaaaaaaaaaaaaaaugcaucccccccccccccccccccccccccccccccaaaggcucuuuucagagccaccagaauu

SEQ ID NO: 2289 - RNA, 1417 nt, Artificial Sequence
  mRNA product Design a-2 comprising derived and/or modified sequence from YFV__NC_002031.1__eSS-NS1 (polyprotein: aa758-1130) (opt6)
gggagaguccgcucagccagguugcagaagcggcuuagcguguguccuaaucuucucucugcguguagguaggccugugccgcaaacaagcuuaccaugucaaugaguaugauauuaguagggguaauaaugauguuccuuagcuuaggaguaggagcagaucaaggaugugcaauaaauuuuggaaaaagagaacuaaaaugcggagacgguauauuuauauuuagagauagugaugauuggcuaaauaaauauaguuacuauccagaagauccaguuaaauuagccucaauaguaaaagcuagcuuugaagaaggaaaauguggacuaaauucaguagacagucuagaacacgaaauguggagaucaagggcagaugaaauaaaugcaaucuuugaagaaaaugaaguggauauaucagugguaguacaagauccaaaaaauguguaccaaagaggaacacauccauuuaguaggauaagagauggauuacaauauggauggaaaacauggggaaaaaauuuaguauuuaguccaggaagaaaaaauggaucauuuauaauagaugggaaaagccgaaaagaauguccauuuucaaacagaguauggaacucauuucaaauugaagaauuuggaacaggaguauuuacaacaagaguauauauggaugcaguauuugaauacaccauagauugugauggaaguauauuaggagcagcaguaaaugggaaaaaaagcgcucacggaaguccaacguuuuggaugggaucacacgagguaaauggcacguggaugauacauacuuuagaagcauuagauuacaaagaaugugaauggccauuaacucauacaauagguacaagcguagaagaaagugagauguuuaugccacguucaaucggggggccaguaucaagucauaaccauauaccaggauauaaaguacaaacgaauggaccuuggaugcaaguaccacuagaaguaaaacgagaagcaugcccaggaacgucaguaauaauagauggaaauugugauggcagggguaaaagcacaagaucaacaacagauucaggaaaaguaauaccugaaugguguuguagaaguuguacaaugccaccaguaucauuccauggaagugauggaugcugguauccaauggaaauuagaccaagaaaaacucaugaaagucauuuaguaagaucuuggguaacugcaugaggacuagucccuguucccagagcccacuuuuuuuucuuuuuuugaaauaaaauagccugucuuucagaucuaaaaaaaaaaaaaaaaaaaaaaaaaaaaaaaaaaaaaaaaaaaaaaaaaaaaaaaaaaaaaaaaugcaucccccccccccccccccccccccccccccccaaaggcucuuuucagagccaccagaauu

SEQ ID NO: 2290 - RNA, 1408 nt, Artificial Sequence
  mRNA product Design a-2 comprising derived and/or modified sequence from YFV__NC_002031.1__SSIgE-NS1 (polyprotein: aa779-1130) (opt6)
gggagaguccgcucagccagguugcagaagcggcuuagcguguguccuaaucuucucucugcguguagguaggccugugccgcaaacaagcuuaccauggacuggacauggauauuauuuuuaguagcagcagcaacaagaguacauucagaucaaggaugugcaauaaauuuuggaaaaagagaacuaaaaugcggagacgguauauuuauauuuagagauagugaugauuggcuaaauaaauauaguuacuauccagaagauccaguuaaauuagccucaauaguaaaagcuagcuuugaagaaggaaaauguggacuaaauucaguagacagucuagaacacgaaauguggagaucaagggcagaugaaauaaaugcaaucuuugaagaaaaugaaguggauauaucagugguaguacaagauccaaaaaauguguaccaaagaggaacacauccauuuaguaggauaagagauggauuacaauauggauggaaaacauggggaaaaaauuuaguauuuaguccaggaagaaaaaauggaucauuuauaauagaugggaaaagccgaaaagaauguccauuuucaaacagaguauggaacucauuucaaauugaagaauuuggaacaggaguauuuacaacaagaguauauauggaugcaguauuugaauacaccauagauugugauggaaguauauuaggagcagcaguaaaugggaaaaaaagcgcucacggaaguccaacguuuuggaugggaucacacgagguaaauggcacguggaugauacauacuuuagaagcauuagauuacaaagaaugugaauggccauuaacucauacaauagguacaagcguagaagaaagugagauguuuaugccacguucaaucggggggccaguaucaagucauaaccauauaccaggauauaaaguacaaacgaauggaccuuggaugcaaguaccacuagaaguaaaacgagaagcaugcccaggaacgucaguaauaauagauggaaauugugauggcagggguaaaagcacaagaucaacaacagauucaggaaaaguaauaccugaaugguguuguagaaguuguacaaugccaccaguaucauuccauggaagugauggaugcugguauccaauggaaauuagaccaagaaaaacucaugaaagucauuuaguaagaucuuggguaacugcaugaggacuagucccuguucccagagcccacuuuuuuuucuuuuuuugaaauaaaauagccugucuuucagaucuaaaaaaaaaaaaaaaaaaaaaaaaaaaaaaaaaaaaaaaaaaaaaaaaaaaaaaaaaaaaaaaaugcaucccccccccccccccccccccccccccccccaaaggcucuuuucagagccaccagaauu

SEQ ID NO: 2291 - RNA, 1558 nt, Artificial Sequence
  mRNA product Design a-2 comprising derived and/or modified sequence from YFV__NC_002031.1__eSS-NS1-Y (polyprotein: aa758-1177) (opt11)
gggagaguccgcucagccagguugcagaagcggcuuagcguguguccuaaucuucucucugcguguagguaggccugugccgcaaacaagcuuaccaugagcaugagcaugaucuugguaggggucauaaugauguucuugagccuagggguaggcgcagaccagggaugcgcgauaaacuucggcaaacgcgaacucaaaugcggggacggaaucuucaucuuucgcgacagugacgacuggcuaaacaaguacaguuacuacccggaagaccccguaaaacuagccucaauaguaaaagcgagcuucgaagaaggaaagugcgggcuaaacagcguggacucccuagagcacgagauguggaggucgagagcggacgagaucaacgccauauucgaagaaaaugaaguagacauaagcguagucguacaagaucccaaaaacguguaccagcgcggaacccaccccuucagcaggaucagagacgggcuacaauacggauggaagacauggggcaaaaaccuggucuucagcccgggcaggaaaaacggaucguucaucaucgauggcaaaagccgaaaggagugcccguucucaaacaggguauggaacucguuccagaucgaagaguucggcacaggcgucuucacgacaagagucuacauggacgcaguguucgaauacacaaucgacugcgacggcuccauacugggcgcagccgugaacgggaaaaagagcgcacacggaagcccgaccuuuuggauggguucgcacgaggugaacggaacauggaugauacacaccuuagaagcacucgauuacaaagaaugcgaauggcccuuaacccacaccaucgguacguccguagaagaaagcgaaauguucaugccgcgcucaaucggcggcccagucucgagccacaaccacaucccgggcuauaaaguacaaacaaacgggccauggaugcagguaccccucgaggucaagcgcgaagccugccccggaaccucggucaucaucgacggcaacugcgacggcaggggaaaaagcacgcgcucaaccacggacucgggaaagguaauaccagaguggugcugcaggagcugcaccaugccaccgguaucguuccacggcucagacggaugcugguacccgauggaaaucagacccagaaaaacgcacgagagccaccucguacgcucauggguaaccgcaggcgagauccacgccgugccauuuggacuggucucaaugaugauagcgauggaggucgugcucaggaagaggcaagggcccaagcaaaugcucguaggaggaguaguacuccugggcgcaaugcuggucggacaggugaccugaggacuagucccuguucccagagcccacuuuuuuuucuuuuuuugaaauaaaauagccugucuuucagaucuaaaaaaaaaaaaaaaaaaaaaaaaaaaaaaaaaaaaaaaaaaaaaaaaaaaaaaaaaaaaaaaaugcaucccccccccccccccccccccccccccccccaaaggcucuuuucagagccaccagaauu

SEQ ID NO: 2292 - RNA, 1417 nt, Artificial Sequence
  mRNA product Design a-2 comprising derived and/or modified sequence from YFV__NC_002031.1__eSS-NS1 (polyprotein: aa758-1130) (opt11)
gggagaguccgcucagccagguugcagaagcggcuuagcguguguccuaaucuucucucugcguguagguaggccugugccgcaaacaagcuuaccaugagcaugagcaugaucuugguaggggucauaaugauguucuugagccuagggguaggcgcagaccagggaugcgcgauaaacuucggcaaacgcgaacucaaaugcggggacggaaucuucaucuuucgcgacagugacgacuggcuaaacaaguacaguuacuacccggaagaccccguaaaacuagccucaauaguaaaagcgagcuucgaagaaggaaagugcgggcuaaacagcguggacucccuagagcacgagauguggaggucgagagcggacgagaucaacgccauauucgaagaaaaugaaguagacauaagcguagucguacaagaucccaaaaacguguaccagcgcggaacccaccccuucagcaggaucagagacgggcuacaauacggauggaagacauggggcaaaaaccuggucuucagcccgggcaggaaaaacggaucguucaucaucgauggcaaaagccgaaaggagugcccguucucaaacaggguauggaacucguuccagaucgaagaguucggcacaggcgucuucacgacaagagucuacauggacgcaguguucgaauacacaaucgacugcgacggcuccauacugggcgcagccgugaacgggaaaaagagcgcacacggaagcccgaccuuuuggauggguucgcacgaggugaacggaacauggaugauacacaccuuagaagcacucgauuacaaagaaugcgaauggcccuuaacccacaccaucgguacguccguagaagaaagcgaaauguucaugccgcgcucaaucggcggcccagucucgagccacaaccacaucccgggcuauaaaguacaaacaaacgggccauggaugcagguaccccucgaggucaagcgcgaagccugccccggaaccucggucaucaucgacggcaacugcgacggcaggggaaaaagcacgcgcucaaccacggacucgggaaagguaauaccagaguggugcugcaggagcugcaccaugccaccgguaucguuccacggcucagacggaugcugguacccgauggaaaucagacccagaaaaacgcacgagagccaccucguacgcucauggguaaccgcaugaggacuagucccuguucccagagcccacuuuuuuuucuuuuuuugaaauaaaauagccugucuuucagaucuaaaaaaaaaaaaaaaaaaaaaaaaaaaaaaaaaaaaaaaaaaaaaaaaaaaaaaaaaaaaaaaaugcaucccccccccccccccccccccccccccccccaaaggcucuuuucagagccaccagaauu

SEQ ID NO: 2293 - RNA, 1408 nt, Artificial Sequence
  mRNA product Design a-2 comprising derived and/or modified sequence from YFV__NC_002031.1__SSIgE-NS1 (polyprotein: aa779-1130) (opt11)
gggagaguccgcucagccagguugcagaagcggcuuagcguguguccuaaucuucucucugcguguagguaggccugugccgcaaacaagcuuaccauggauuggacguggauacucuuucucguggccgcggccacgcgcgugcacucggaccagggaugcgcgauaaacuucggcaaacgcgaacucaaaugcggggacggaaucuucaucuuucgcgacagugacgacuggcuaaacaaguacaguuacuacccggaagaccccguaaaacuagccucaauaguaaaagcgagcuucgaagaaggaaagugcgggcuaaacagcguggacucccuagagcacgagauguggaggucgagagcggacgagaucaacgccauauucgaagaaaaugaaguagacauaagcguagucguacaagaucccaaaaacguguaccagcgcggaacccaccccuucagcaggaucagagacgggcuacaauacggauggaagacauggggcaaaaaccuggucuucagcccgggcaggaaaaacggaucguucaucaucgauggcaaaagccgaaaggagugcccguucucaaacaggguauggaacucguuccagaucgaagaguucggcacaggcgucuucacgacaagagucuacauggacgcaguguucgaauacacaaucgacugcgacggcuccauacugggcgcagccgugaacgggaaaaagagcgcacacggaagcccgaccuuuuggauggguucgcacgaggugaacggaacauggaugauacacaccuuagaagcacucgauuacaaagaaugcgaauggcccuuaacccacaccaucgguacguccguagaagaaagcgaaauguucaugccgcgcucaaucggcggcccagucucgagccacaaccacaucccgggcuauaaaguacaaacaaacgggccauggaugcagguaccccucgaggucaagcgcgaagccugccccggaaccucggucaucaucgacggcaacugcgacggcaggggaaaaagcacgcgcucaaccacggacucgggaaagguaauaccagaguggugcugcaggagcugcaccaugccaccgguaucguuccacggcucagacggaugcugguacccgauggaaaucagacccagaaaaacgcacgagagccaccucguacgcucauggguaaccgcaugaggacuagucccuguucccagagcccacuuuuuuuucuuuuuuugaaauaaaauagccugucuuucagaucuaaaaaaaaaaaaaaaaaaaaaaaaaaaaaaaaaaaaaaaaaaaaaaaaaaaaaaaaaaaaaaaaugcaucccccccccccccccccccccccccccccccaaaggcucuuuucagagccaccagaauu

SEQ ID NO: 2294 - RNA, 1603 nt, Artificial Sequence
  mRNA product Design b-4 comprising derived and/or modified sequence from YFV__NC_002031.1__eSS-NS1-Y (polyprotein: aa758-1177) (wt)
gggagagucccgcagucggcguccagcggcucugcuuguucgugugugugucguugcaggccuuauucaagcuuaccauguccaugagcaugaucuugguaggagugaucaugauguuuuugucucuaggaguuggggcggaucaaggaugcgccaucaacuuuggcaagagagagcucaagugcggagaugguaucuucauauuuagagacucugaugacuggcugaacaaguacucauacuauccagaagauccugugaagcuugcaucaauagugaaagccucuuuugaagaagggaaguguggccuaaauucaguugacucccuugagcaugagauguggagaagcagggcagaugagaucaaugccauuuuugaggaaaacgagguggacauuucuguugucgugcaggauccaaagaauguuuaccagagaggaacucauccauuuuccagaauucgggauggucugcaguaugguuggaagacuugggguaagaaccuuguguucuccccagggaggaagaauggaagcuucaucauagauggaaaguccaggaaagaaugcccguuuucaaaccgggucuggaauucuuuccagauagaggaguuugggacgggaguguucaccacacgcguguacauggacgcagucuuugaauacaccauagacugcgauggaucuaucuugggugcagcggugaacggaaaaaagagugcccauggcucuccaacauuuuggaugggaagucaugaaguaaaugggacauggaugauccacaccuuggaggcauuagauuacaaggagugugaguggccacugacacauacgauuggaacaucaguugaagagagugaaauguucaugccgagaucaaucggaggcccaguuagcucucacaaucauaucccuggauacaagguucagacgaacggaccuuggaugcagguaccacuagaagugaagagagaagcuugcccagggacuagcgugaucauugauggcaacugugauggacggggaaaaucaaccagauccaccacggauagcgggaaaguuauuccugaaugguguugccgcuccugcacaaugccgccugugagcuuccaugguagugauggguguugguaucccauggaaauuaggccaaggaaaacgcaugaaagccaucuggugcgcuccuggguuacagcuggagaaauacaugcugucccuuuugguuuggugagcaugaugauagcaauggaagugguccuaaggaaaagacagggaccaaagcaaauguugguuggaggaguagugcucuugggagcaaugcuggucgggcaaguaacuugaggacuaguaauaaggaaacuguaugaaugucugugggcaggaagugaagagauccuucuguaaagguuuuuggaauuaugucugcugaauaauaaacuuuuuugaaauaauaaaucugguagaaaaaugagaucuaaaaaaaaaaaaaaaaaaaaaaaaaaaaaaaaaaaaaaaaaaaaaaaaaaaaaaaaaaaaaaaaugcaucccccccccccccccccccccccccccccccaaaggcucuuuucagagccaccagaauu

SEQ ID NO: 2295 - RNA, 1462 nt, Artificial Sequence
  mRNA product Design b-4 comprising derived and/or modified sequence from YFV__NC_002031.1__eSS-NS1 (polyprotein: aa758-1130) (wt)
gggagagucccgcagucggcguccagcggcucugcuuguucgugugugugucguugcaggccuuauucaagcuuaccauguccaugagcaugaucuugguaggagugaucaugauguuuuugucucuaggaguuggggcggaucaaggaugcgccaucaacuuuggcaagagagagcucaagugcggagaugguaucuucauauuuagagacucugaugacuggcugaacaaguacucauacuauccagaagauccugugaagcuugcaucaauagugaaagccucuuuugaagaagggaaguguggccuaaauucaguugacucccuugagcaugagauguggagaagcagggcagaugagaucaaugccauuuuugaggaaaacgagguggacauuucuguugucgugcaggauccaaagaauguuuaccagagaggaacucauccauuuuccagaauucgggauggucugcaguaugguuggaagacuugggguaagaaccuuguguucuccccagggaggaagaauggaagcuucaucauagauggaaaguccaggaaagaaugcccguuuucaaaccgggucuggaauucuuuccagauagaggaguuugggacgggaguguucaccacacgcguguacauggacgcagucuuugaauacaccauagacugcgauggaucuaucuugggugcagcggugaacggaaaaaagagugcccauggcucuccaacauuuuggaugggaagucaugaaguaaaugggacauggaugauccacaccuuggaggcauuagauuacaaggagugugaguggccacugacacauacgauuggaacaucaguugaagagagugaaauguucaugccgagaucaaucggaggcccaguuagcucucacaaucauaucccuggauacaagguucagacgaacggaccuuggaugcagguaccacuagaagugaagagagaagcuugcccagggacuagcgugaucauugauggcaacugugauggacggggaaaaucaaccagauccaccacggauagcgggaaaguuauuccugaaugguguugccgcuccugcacaaugccgccugugagcuuccaugguagugauggguguugguaucccauggaaauuaggccaaggaaaacgcaugaaagccaucuggugcgcuccuggguuacagcuugaggacuaguaauaaggaaacuguaugaaugucugugggcaggaagugaagagauccuucuguaaagguuuuuggaauuaugucugcugaauaauaaacuuuuuugaaauaauaaaucugguagaaaaaugagaucuaaaaaaaaaaaaaaaaaaaaaaaaaaaaaaaaaaaaaaaaaaaaaaaaaaaaaaaaaaaaaaaaugcaucccccccccccccccccccccccccccccccaaaggcucuuuucagagccaccagaauu

SEQ ID NO: 2296 - RNA, 1453 nt, Artificial Sequence
  mRNA product Design b-4 comprising derived and/or modified sequence from YFV__NC_002031.1__SSIgE-NS1 (polyprotein: aa779-1130) (wt)
gggagagucccgcagucggcguccagcggcucugcuuguucgugugugugucguugcaggccuuauucaagcuuaccauggacuggaccuggauccuguuccucguggccgccgcgacccgcguccacagcgaucaaggaugcgccaucaacuuuggcaagagagagcucaagugcggagaugguaucuucauauuuagagacucugaugacuggcugaacaaguacucauacuauccagaagauccugugaagcuugcaucaauagugaaagccucuuuugaagaagggaaguguggccuaaauucaguugacucccuugagcaugagauguggagaagcagggcagaugagaucaaugccauuuuugaggaaaacgagguggacauuucuguugucgugcaggauccaaagaauguuuaccagagaggaacucauccauuuuccagaauucgggauggucugcaguaugguuggaagacuugggguaagaaccuuguguucuccccagggaggaagaauggaagcuucaucauagauggaaaguccaggaaagaaugcccguuuucaaaccgggucuggaauucuuuccagauagaggaguuugggacgggaguguucaccacacgcguguacauggacgcagucuuugaauacaccauagacugcgauggaucuaucuugggugcagcggugaacggaaaaaagagugcccauggcucuccaacauuuuggaugggaagucaugaaguaaaugggacauggaugauccacaccuuggaggcauuagauuacaaggagugugaguggccacugacacauacgauuggaacaucaguugaagagagugaaauguucaugccgagaucaaucggaggcccaguuagcucucacaaucauaucccuggauacaagguucagacgaacggaccuuggaugcagguaccacuagaagugaagagagaagcuugcccagggacuagcgugaucauugauggcaacugugauggacggggaaaaucaaccagauccaccacggauagcgggaaaguuauuccugaaugguguugccgcuccugcacaaugccgccugugagcuuccaugguagugauggguguugguaucccauggaaauuaggccaaggaaaacgcaugaaagccaucuggugcgcuccuggguuacagcuugaggacuaguaauaaggaaacuguaugaaugucugugggcaggaagugaagagauccuucuguaaagguuuuuggaauuaugucugcugaauaauaaacuuuuuugaaauaauaaaucugguagaaaaaugagaucuaaaaaaaaaaaaaaaaaaaaaaaaaaaaaaaaaaaaaaaaaaaaaaaaaaaaaaaaaaaaaaaaugcaucccccccccccccccccccccccccccccccaaaggcucuuuucagagccaccagaauu

SEQ ID NO: 2297 - RNA, 1603 nt, Artificial Sequence
  mRNA product Design b-4 comprising derived and/or modified sequence from YFV__NC_002031.1__eSS-NS1-Y (polyprotein: aa758-1177) (opt1)
gggagagucccgcagucggcguccagcggcucugcuuguucgugugugugucguugcaggccuuauucaagcuuaccaugagcauguccaugauccuggugggcgucaucaugauguuccucagccugggggugggcgccgaccaggggugcgccaucaacuucggcaagcgcgagcugaagugcggggacggcaucuucaucuuccgggacuccgacgacuggcucaacaaguacagcuacuaccccgaggacccggugaagcuggcguccaucgucaaggccagcuucgaggagggcaagugcgggcugaacuccguggacagccucgagcacgagauguggcgcucccgggccgacgagaucaacgccaucuucgaggagaacgagguggacaucagcgucguggugcaggaccccaagaacgucuaccagcgcggcacccaccccuucucccggauccgcgacgggcugcaguacggcuggaagaccugggggaagaaccugguguucagccccggccggaagaacggcuccuucaucaucgacggcaagagccgcaaggagugcccguucuccaaccggguguggaacagcuuccagaucgaggaguucgggacgggggucuucaccacccgcguguacauggacgccguguucgaguacaccaucgacugcgacggcuccauccucggcgcggccgucaacgggaagaaguccgcccacggcagccccacguucuggauggggagccacgaggugaacggcaccuggaugauccacacccuggaggcccuggacuacaaggagugcgaguggccccucacccacacgaucgggaccagcguggaggaguccgagauguucaugccccggagcaucggcggcccggucuccagccacaaccacauccccggguacaaggugcagaccaacggccccuggaugcaggucccccuggaggugaagcgcgaggcgugcccggggaccuccgugaucaucgacggcaacugcgacgggcggggcaagagcacgcgcuccaccaccgacagcggcaaggugauccccgaguggugcugccgguccugcaccaugccgcccgucagcuuccacggguccgacggcugcugguaccccauggagauccgcccccggaagacgcacgagagccaccuggugcgcuccugggucaccgccggggagauccacgccgugcccuucggccucgugagcaugaugaucgccauggaggucgugcugcggaagcgccaggggcccaagcagaugcuggugggcggcgucgugcuccugggggccaugcuggugggccaggucaccugaggacuaguaauaaggaaacuguaugaaugucugugggcaggaagugaagagauccuucuguaaagguuuuuggaauuaugucugcugaauaauaaacuuuuuugaaauaauaaaucugguagaaaaaugagaucuaaaaaaaaaaaaaaaaaaaaaaaaaaaaaaaaaaaaaaaaaaaaaaaaaaaaaaaaaaaaaaaaugcaucccccccccccccccccccccccccccccccaaaggcucuuuucagagccaccagaauu

SEQ ID NO: 2298 - RNA, 1462 nt, Artificial Sequence
  mRNA product Design b-4 comprising derived and/or modified sequence from YFV__NC_002031.1__eSS-NS1 (polyprotein: aa758-1130) (opt1)
gggagagucccgcagucggcguccagcggcucugcuuguucgugugugugucguugcaggccuuauucaagcuuaccaugagcauguccaugauccuggugggcgucaucaugauguuccucagccugggggugggcgccgaccaggggugcgccaucaacuucggcaagcgcgagcugaagugcggggacggcaucuucaucuuccgggacuccgacgacuggcucaacaaguacagcuacuaccccgaggacccggugaagcuggcguccaucgucaaggccagcuucgaggagggcaagugcgggcugaacuccguggacagccucgagcacgagauguggcgcucccgggccgacgagaucaacgccaucuucgaggagaacgagguggacaucagcgucguggugcaggaccccaagaacgucuaccagcgcggcacccaccccuucucccggauccgcgacgggcugcaguacggcuggaagaccugggggaagaaccugguguucagccccggccggaagaacggcuccuucaucaucgacggcaagagccgcaaggagugcccguucuccaaccggguguggaacagcuuccagaucgaggaguucgggacgggggucuucaccacccgcguguacauggacgccguguucgaguacaccaucgacugcgacggcuccauccucggcgcggccgucaacgggaagaaguccgcccacggcagccccacguucuggauggggagccacgaggugaacggcaccuggaugauccacacccuggaggcccuggacuacaaggagugcgaguggccccucacccacacgaucgggaccagcguggaggaguccgagauguucaugccccggagcaucggcggcccggucuccagccacaaccacauccccggguacaaggugcagaccaacggccccuggaugcaggucccccuggaggugaagcgcgaggcgugcccggggaccuccgugaucaucgacggcaacugcgacgggcggggcaagagcacgcgcuccaccaccgacagcggcaaggugauccccgaguggugcugccgguccugcaccaugccgcccgucagcuuccacggguccgacggcugcugguaccccauggagauccgcccccggaagacgcacgagagccaccuggugcgcuccugggucaccgccugaggacuaguaauaaggaaacuguaugaaugucugugggcaggaagugaagagauccuucuguaaagguuuuuggaauuaugucugcugaauaauaaacuuuuuugaaauaauaaaucugguagaaaaaugagaucuaaaaaaaaaaaaaaaaaaaaaaaaaaaaaaaaaaaaaaaaaaaaaaaaaaaaaaaaaaaaaaaaugcaucccccccccccccccccccccccccccccccaaaggcucuuuucagagccaccagaauu

SEQ ID NO: 2299 - RNA, 1453 nt, Artificial Sequence
  mRNA product Design b-4 comprising derived and/or modified sequence from YFV__NC_002031.1__SSIgE-NS1 (polyprotein: aa779-1130) (opt1)
gggagagucccgcagucggcguccagcggcucugcuuguucgugugugugucguugcaggccuuauucaagcuuaccauggacuggaccuggauccuguuccucguggccgccgcgacccgcguccacagcgaccaggggugcgccaucaacuucggcaagcgcgagcugaagugcggggacggcaucuucaucuuccgggacuccgacgacuggcucaacaaguacagcuacuaccccgaggacccggugaagcuggcguccaucgucaaggccagcuucgaggagggcaagugcgggcugaacuccguggacagccucgagcacgagauguggcgcucccgggccgacgagaucaacgccaucuucgaggagaacgagguggacaucagcgucguggugcaggaccccaagaacgucuaccagcgcggcacccaccccuucucccggauccgcgacgggcugcaguacggcuggaagaccugggggaagaaccugguguucagccccggccggaagaacggcuccuucaucaucgacggcaagagccgcaaggagugcccguucuccaaccggguguggaacagcuuccagaucgaggaguucgggacgggggucuucaccacccgcguguacauggacgccguguucgaguacaccaucgacugcgacggcuccauccucggcgcggccgucaacgggaagaaguccgcccacggcagccccacguucuggauggggagccacgaggugaacggcaccuggaugauccacacccuggaggcccuggacuacaaggagugcgaguggccccucacccacacgaucgggaccagcguggaggaguccgagauguucaugccccggagcaucggcggcccggucuccagccacaaccacauccccggguacaaggugcagaccaacggccccuggaugcaggucccccuggaggugaagcgcgaggcgugcccggggaccuccgugaucaucgacggcaacugcgacgggcggggcaagagcacgcgcuccaccaccgacagcggcaaggugauccccgaguggugcugccgguccugcaccaugccgcccgucagcuuccacggguccgacggcugcugguaccccauggagauccgcccccggaagacgcacgagagccaccuggugcgcuccugggucaccgccugaggacuaguaauaaggaaacuguaugaaugucugugggcaggaagugaagagauccuucuguaaagguuuuuggaauuaugucugcugaauaauaaacuuuuuugaaauaauaaaucugguagaaaaaugagaucuaaaaaaaaaaaaaaaaaaaaaaaaaaaaaaaaaaaaaaaaaaaaaaaaaaaaaaaaaaaaaaaaugcaucccccccccccccccccccccccccccccccaaaggcucuuuucagagccaccagaauu

SEQ ID NO: 2300 - RNA, 1603 nt, Artificial Sequence
  mRNA product Design b-4 comprising derived and/or modified sequence from YFV__NC_002031.1__eSS-NS1-Y (polyprotein: aa758-1177) (opt2)
gggagagucccgcagucggcguccagcggcucugcuuguucgugugugugucguugcaggccuuauucaagcuuaccauguccauguccaugauccucgucggcgucaucaugauguuccucucccucggcgucggcgccgaccagggcugcgccaucaacuucggcaagcgcgagcucaagugcggcgacggcaucuucaucuuccgcgacuccgacgacuggcucaacaaguacuccuacuaccccgaggaccccgucaagcucgccuccaucgucaaggccuccuucgaggagggcaagugcggccucaacuccgucgacucccucgagcacgagauguggcgcucccgcgccgacgagaucaacgccaucuucgaggagaacgaggucgacaucuccgucgucguccaggaccccaagaacgucuaccagcgcggcacccaccccuucucccgcauccgcgacggccuccaguacggcuggaagaccuggggcaagaaccucgucuucucccccggccgcaagaacggcuccuucaucaucgacggcaagucccgcaaggagugccccuucuccaaccgcgucuggaacuccuuccagaucgaggaguucggcaccggcgucuucaccacccgcgucuacauggacgccgucuucgaguacaccaucgacugcgacggcuccauccucggcgccgccgucaacggcaagaaguccgcccacggcucccccaccuucuggaugggcucccacgaggucaacggcaccuggaugauccacacccucgaggcccucgacuacaaggagugcgaguggccccucacccacaccaucggcaccuccgucgaggaguccgagauguucaugccccgcuccaucggcggccccgucuccucccacaaccacauccccggcuacaagguccagaccaacggccccuggaugcaggucccccucgaggucaagcgcgaggccugccccggcaccuccgucaucaucgacggcaacugcgacggccgcggcaaguccacccgcuccaccaccgacuccggcaaggucauccccgaguggugcugccgcuccugcaccaugccccccgucuccuuccacggcuccgacggcugcugguaccccauggagauccgcccccgcaagacccacgagucccaccucguccgcuccugggucaccgccggcgagauccacgccguccccuucggccucgucuccaugaugaucgccauggaggucguccuccgcaagcgccagggccccaagcagaugcucgucggcggcgucguccuccucggcgccaugcucgucggccaggucaccugaggacuaguaauaaggaaacuguaugaaugucugugggcaggaagugaagagauccuucuguaaagguuuuuggaauuaugucugcugaauaauaaacuuuuuugaaauaauaaaucugguagaaaaaugagaucuaaaaaaaaaaaaaaaaaaaaaaaaaaaaaaaaaaaaaaaaaaaaaaaaaaaaaaaaaaaaaaaaugcaucccccccccccccccccccccccccccccccaaaggcucuuuucagagccaccagaauu

SEQ ID NO: 2301 - RNA, 1462 nt, Artificial Sequence
  mRNA product Design b-4 comprising derived and/or modified sequence from YFV__NC_002031.1__eSS-NS1 (polyprotein: aa758-1130) (opt2)
gggagagucccgcagucggcguccagcggcucugcuuguucgugugugugucguugcaggccuuauucaagcuuaccauguccauguccaugauccucgucggcgucaucaugauguuccucucccucggcgucggcgccgaccagggcugcgccaucaacuucggcaagcgcgagcucaagugcggcgacggcaucuucaucuuccgcgacuccgacgacuggcucaacaaguacuccuacuaccccgaggaccccgucaagcucgccuccaucgucaaggccuccuucgaggagggcaagugcggccucaacuccgucgacucccucgagcacgagauguggcgcucccgcgccgacgagaucaacgccaucuucgaggagaacgaggucgacaucuccgucgucguccaggaccccaagaacgucuaccagcgcggcacccaccccuucucccgcauccgcgacggccuccaguacggcuggaagaccuggggcaagaaccucgucuucucccccggccgcaagaacggcuccuucaucaucgacggcaagucccgcaaggagugccccuucuccaaccgcgucuggaacuccuuccagaucgaggaguucggcaccggcgucuucaccacccgcgucuacauggacgccgucuucgaguacaccaucgacugcgacggcuccauccucggcgccgccgucaacggcaagaaguccgcccacggcucccccaccuucuggaugggcucccacgaggucaacggcaccuggaugauccacacccucgaggcccucgacuacaaggagugcgaguggccccucacccacaccaucggcaccuccgucgaggaguccgagauguucaugccccgcuccaucggcggccccgucuccucccacaaccacauccccggcuacaagguccagaccaacggccccuggaugcaggucccccucgaggucaagcgcgaggccugccccggcaccuccgucaucaucgacggcaacugcgacggccgcggcaaguccacccgcuccaccaccgacuccggcaaggucauccccgaguggugcugccgcuccugcaccaugccccccgucuccuuccacggcuccgacggcugcugguaccccauggagauccgcccccgcaagacccacgagucccaccucguccgcuccugggucaccgccugaggacuaguaauaaggaaacuguaugaaugucugugggcaggaagugaagagauccuucuguaaagguuuuuggaauuaugucugcugaauaauaaacuuuuuugaaauaauaaaucugguagaaaaaugagaucuaaaaaaaaaaaaaaaaaaaaaaaaaaaaaaaaaaaaaaaaaaaaaaaaaaaaaaaaaaaaaaaaugcaucccccccccccccccccccccccccccccccaaaggcucuuuucagagccaccagaauu

SEQ ID NO: 2302 - RNA, 1453 nt, Artificial Sequence
  mRNA product Design b-4 comprising derived and/or modified sequence from YFV__NC_002031.1__SSIgE-NS1 (polyprotein: aa779-1130) (opt2)
gggagagucccgcagucggcguccagcggcucugcuuguucgugugugugucguugcaggccuuauucaagcuuaccauggacuggaccuggauccucuuccucgucgccgccgccacccgcguccacuccgaccagggcugcgccaucaacuucggcaagcgcgagcucaagugcggcgacggcaucuucaucuuccgcgacuccgacgacuggcucaacaaguacuccuacuaccccgaggaccccgucaagcucgccuccaucgucaaggccuccuucgaggagggcaagugcggccucaacuccgucgacucccucgagcacgagauguggcgcucccgcgccgacgagaucaacgccaucuucgaggagaacgaggucgacaucuccgucgucguccaggaccccaagaacgucuaccagcgcggcacccaccccuucucccgcauccgcgacggccuccaguacggcuggaagaccuggggcaagaaccucgucuucucccccggccgcaagaacggcuccuucaucaucgacggcaagucccgcaaggagugccccuucuccaaccgcgucuggaacuccuuccagaucgaggaguucggcaccggcgucuucaccacccgcgucuacauggacgccgucuucgaguacaccaucgacugcgacggcuccauccucggcgccgccgucaacggcaagaaguccgcccacggcucccccaccuucuggaugggcucccacgaggucaacggcaccuggaugauccacacccucgaggcccucgacuacaaggagugcgaguggccccucacccacaccaucggcaccuccgucgaggaguccgagauguucaugccccgcuccaucggcggccccgucuccucccacaaccacauccccggcuacaagguccagaccaacggccccuggaugcaggucccccucgaggucaagcgcgaggccugccccggcaccuccgucaucaucgacggcaacugcgacggccgcggcaaguccacccgcuccaccaccgacuccggcaaggucauccccgaguggugcugccgcuccugcaccaugccccccgucuccuuccacggcuccgacggcugcugguaccccauggagauccgcccccgcaagacccacgagucccaccucguccgcuccugggucaccgccugaggacuaguaauaaggaaacuguaugaaugucugugggcaggaagugaagagauccuucuguaaagguuuuuggaauuaugucugcugaauaauaaacuuuuuugaaauaauaaaucugguagaaaaaugagaucuaaaaaaaaaaaaaaaaaaaaaaaaaaaaaaaaaaaaaaaaaaaaaaaaaaaaaaaaaaaaaaaaugcaucccccccccccccccccccccccccccccccaaaggcucuuuucagagccaccagaauu

SEQ ID NO: 2303 - RNA, 1603 nt, Artificial Sequence
  mRNA product Design b-4 comprising derived and/or modified sequence from YFV__NC_002031.1__eSS-NS1-Y (polyprotein: aa758-1177) (opt3)
gggagagucccgcagucggcguccagcggcucugcuuguucgugugugugucguugcaggccuuauucaagcuuaccaugagcauguccaugauccuggugggcgucauuaugauguuccucucucuugggguuggagccgaccaggguugcgcuauaaacuuuggcaagagagagcugaaauguggggauggaaucuucauuuuuagggacucagaugacugguugaauaaguacaguuauuaccccgaagauccugugaaauuagcaagcaucguaaaggccuccuucgaggaaggcaaaugcggucugaacucuguggacucgcuagagcacgaaauguggcggucacgcgcggaugagauuaaugcuaucuuugaggaaaacgaggucgacauaagcgugguugugcaagauccaaagaaugucuaucagcgagggacccauccguucagucguaucagagacggacuccaguacggcuggaagacauggggcaaaaaccugguguuuucccccgggaggaagaauggaucuuucauuaucgaugguaaaagccggaaggaauguccuuuuuccaaccgcguauggaacucauuccagauugaggaguuuggcacugggguuuucacgaccagaguguauauggacgccgucuuugaauacacaaucgauugcgacggaaguauacuuggcgcagccgugaaugguaaaaagagcgcucacgggucuccaacuuucuggaugggaucccaugaggugaauggcaccuggaugauucacacacuggaagcauuggacuauaaggagugugaauggccccucacccauacuaucggcacaucagucgaggagagcgaaauguucaugccuaggaguauugggggaccaguuucuucccacaaccacauccccgguuacaaagugcaaaccaauggcccuuggaugcagguaccacuggaggugaagcgggaagccugcccggggacgagcgucaucauugauggaaacugugacggccgcgguaaaucgacucgaucuaccacagauuccgggaaggugauacccgaguggugcuguagaucaugcacuaugccuccaguuaguuuucauggcagcgacggauguugguaccccauggaaaucaggccucggaaaacccacgagucccaucuggugcguucuugggucacagcuggcgagauucacgccgugccauucgggcucguaagcaugaugaucgcgauggaaguuguguuacgcaagagacagggacccaaacagaugcuggucgguggcgugguccuuuugggggcaaugcuggugggacaaguuaccugaggacuaguaauaaggaaacuguaugaaugucugugggcaggaagugaagagauccuucuguaaagguuuuuggaauuaugucugcugaauaauaaacuuuuuugaaauaauaaaucugguagaaaaaugagaucuaaaaaaaaaaaaaaaaaaaaaaaaaaaaaaaaaaaaaaaaaaaaaaaaaaaaaaaaaaaaaaaaugcaucccccccccccccccccccccccccccccccaaaggcucuuuucagagccaccagaauu

SEQ ID NO: 2304 - RNA, 1462 nt, Artificial Sequence
  mRNA product Design b-4 comprising derived and/or modified sequence from YFV__NC_002031.1__eSS-NS1 (polyprotein: aa758-1130) (opt3)
gggagagucccgcagucggcguccagcggcucugcuuguucgugugugugucguugcaggccuuauucaagcuuaccaugagcauguccaugauccuggugggcgucauuaugauguuccucucucuugggguuggagccgaccaggguugcgcuauaaacuuuggcaagagagagcugaaauguggggauggaaucuucauuuuuagggacucagaugacugguugaauaaguacaguuauuaccccgaagauccugugaaauuagcaagcaucguaaaggccuccuucgaggaaggcaaaugcggucugaacucuguggacucgcuagagcacgaaauguggcggucacgcgcggaugagauuaaugcuaucuuugaggaaaacgaggucgacauaagcgugguugugcaagauccaaagaaugucuaucagcgagggacccauccguucagucguaucagagacggacuccaguacggcuggaagacauggggcaaaaaccugguguuuucccccgggaggaagaauggaucuuucauuaucgaugguaaaagccggaaggaauguccuuuuuccaaccgcguauggaacucauuccagauugaggaguuuggcacugggguuuucacgaccagaguguauauggacgccgucuuugaauacacaaucgauugcgacggaaguauacuuggcgcagccgugaaugguaaaaagagcgcucacgggucuccaacuuucuggaugggaucccaugaggugaauggcaccuggaugauucacacacuggaagcauuggacuauaaggagugugaauggccccucacccauacuaucggcacaucagucgaggagagcgaaauguucaugccuaggaguauugggggaccaguuucuucccacaaccacauccccgguuacaaagugcaaaccaauggcccuuggaugcagguaccacuggaggugaagcgggaagccugcccggggacgagcgucaucauugauggaaacugugacggccgcgguaaaucgacucgaucuaccacagauuccgggaaggugauacccgaguggugcuguagaucaugcacuaugccuccaguuaguuuucauggcagcgacggauguugguaccccauggaaaucaggccucggaaaacccacgagucccaucuggugcguucuugggucacagcuugaggacuaguaauaaggaaacuguaugaaugucugugggcaggaagugaagagauccuucuguaaagguuuuuggaauuaugucugcugaauaauaaacuuuuuugaaauaauaaaucugguagaaaaaugagaucuaaaaaaaaaaaaaaaaaaaaaaaaaaaaaaaaaaaaaaaaaaaaaaaaaaaaaaaaaaaaaaaaugcaucccccccccccccccccccccccccccccccaaaggcucuuuucagagccaccagaauu

SEQ ID NO: 2305 - RNA, 1453 nt, Artificial Sequence
  mRNA product Design b-4 comprising derived and/or modified sequence from YFV__NC_002031.1__SSIgE-NS1 (polyprotein: aa779-1130) (opt3)
gggagagucccgcagucggcguccagcggcucugcuuguucgugugugugucguugcaggccuuauucaagcuuaccauggacuggaccuggauccuguuccucguggccgcugcaacaagaguccacagcgaccaggguugcgcuauaaacuuuggcaagagagagcugaaauguggggauggaaucuucauuuuuagggacucagaugacugguugaauaaguacaguuauuaccccgaagauccugugaaauuagcaagcaucguaaaggccuccuucgaggaaggcaaaugcggucugaacucuguggacucgcuagagcacgaaauguggcggucacgcgcggaugagauuaaugcuaucuuugaggaaaacgaggucgacauaagcgugguugugcaagauccaaagaaugucuaucagcgagggacccauccguucagucguaucagagacggacuccaguacggcuggaagacauggggcaaaaaccugguguuuucccccgggaggaagaauggaucuuucauuaucgaugguaaaagccggaaggaauguccuuuuuccaaccgcguauggaacucauuccagauugaggaguuuggcacugggguuuucacgaccagaguguauauggacgccgucuuugaauacacaaucgauugcgacggaaguauacuuggcgcagccgugaaugguaaaaagagcgcucacgggucuccaacuuucuggaugggaucccaugaggugaauggcaccuggaugauucacacacuggaagcauuggacuauaaggagugugaauggccccucacccauacuaucggcacaucagucgaggagagcgaaauguucaugccuaggaguauugggggaccaguuucuucccacaaccacauccccgguuacaaagugcaaaccaauggcccuuggaugcagguaccacuggaggugaagcgggaagccugcccggggacgagcgucaucauugauggaaacugugacggccgcgguaaaucgacucgaucuaccacagauuccgggaaggugauacccgaguggugcuguagaucaugcacuaugccuccaguuaguuuucauggcagcgacggauguugguaccccauggaaaucaggccucggaaaacccacgagucccaucuggugcguucuugggucacagcuugaggacuaguaauaaggaaacuguaugaaugucugugggcaggaagugaagagauccuucuguaaagguuuuuggaauuaugucugcugaauaauaaacuuuuuugaaauaauaaaucugguagaaaaaugagaucuaaaaaaaaaaaaaaaaaaaaaaaaaaaaaaaaaaaaaaaaaaaaaaaaaaaaaaaaaaaaaaaaugcaucccccccccccccccccccccccccccccccaaaggcucuuuucagagccaccagaauu

SEQ ID NO: 2306 - RNA, 1603 nt, Artificial Sequence
  mRNA product Design b-4 comprising derived and/or modified sequence from YFV__NC_002031.1__eSS-NS1-Y (polyprotein: aa758-1177) (opt4)
gggagagucccgcagucggcguccagcggcucugcuuguucgugugugugucguugcaggccuuauucaagcuuaccaugagcaugagcaugauccuggugggcgugaucaugauguuccugagccugggcgugggcgccgaccagggcugcgccaucaacuucggcaagagagagcugaagugcggcgacggcaucuucaucuucagagacagcgacgacuggcugaacaaguacagcuacuaccccgaggaccccgugaagcuggccagcaucgugaaggccagcuucgaggagggcaagugcggccugaacagcguggacagccuggagcacgagauguggagaagcagagccgacgagaucaacgccaucuucgaggagaacgagguggacaucagcgugguggugcaggaccccaagaacguguaccagagaggcacccaccccuucagcagaaucagagacggccugcaguacggcuggaagaccuggggcaagaaccugguguucagccccggcagaaagaacggcagcuucaucaucgacggcaagagcagaaaggagugccccuucagcaacagaguguggaacagcuuccagaucgaggaguucggcaccggcguguucaccaccagaguguacauggacgccguguucgaguacaccaucgacugcgacggcagcauccugggcgccgccgugaacggcaagaagagcgcccacggcagccccaccuucuggaugggcagccacgaggugaacggcaccuggaugauccacacccuggaggcccuggacuacaaggagugcgaguggccccugacccacaccaucggcaccagcguggaggagagcgagauguucaugcccagaagcaucggcggccccgugagcagccacaaccacauccccggcuacaaggugcagaccaacggccccuggaugcaggugccccuggaggugaagagagaggccugccccggcaccagcgugaucaucgacggcaacugcgacggcagaggcaagagcaccagaagcaccaccgacagcggcaaggugauccccgaguggugcugcagaagcugcaccaugccccccgugagcuuccacggcagcgacggcugcugguaccccauggagaucagacccagaaagacccacgagagccaccuggugagaagcugggugaccgccggcgagauccacgccgugcccuucggccuggugagcaugaugaucgccauggagguggugcugagaaagagacagggccccaagcagaugcuggugggcggcguggugcugcugggcgccaugcuggugggccaggugaccugaggacuaguaauaaggaaacuguaugaaugucugugggcaggaagugaagagauccuucuguaaagguuuuuggaauuaugucugcugaauaauaaacuuuuuugaaauaauaaaucugguagaaaaaugagaucuaaaaaaaaaaaaaaaaaaaaaaaaaaaaaaaaaaaaaaaaaaaaaaaaaaaaaaaaaaaaaaaaugcaucccccccccccccccccccccccccccccccaaaggcucuuuucagagccaccagaauu

SEQ ID NO: 2307 - RNA, 1462 nt, Artificial Sequence
  mRNA product Design b-4 comprising derived and/or modified sequence from YFV__NC_002031.1__eSS-NS1 (polyprotein: aa758-1130) (opt4)
gggagagucccgcagucggcguccagcggcucugcuuguucgugugugugucguugcaggccuuauucaagcuuaccaugagcaugagcaugauccuggugggcgugaucaugauguuccugagccugggcgugggcgccgaccagggcugcgccaucaacuucggcaagagagagcugaagugcggcgacggcaucuucaucuucagagacagcgacgacuggcugaacaaguacagcuacuaccccgaggaccccgugaagcuggccagcaucgugaaggccagcuucgaggagggcaagugcggccugaacagcguggacagccuggagcacgagauguggagaagcagagccgacgagaucaacgccaucuucgaggagaacgagguggacaucagcgugguggugcaggaccccaagaacguguaccagagaggcacccaccccuucagcagaaucagagacggccugcaguacggcuggaagaccuggggcaagaaccugguguucagccccggcagaaagaacggcagcuucaucaucgacggcaagagcagaaaggagugccccuucagcaacagaguguggaacagcuuccagaucgaggaguucggcaccggcguguucaccaccagaguguacauggacgccguguucgaguacaccaucgacugcgacggcagcauccugggcgccgccgugaacggcaagaagagcgcccacggcagccccaccuucuggaugggcagccacgaggugaacggcaccuggaugauccacacccuggaggcccuggacuacaaggagugcgaguggccccugacccacaccaucggcaccagcguggaggagagcgagauguucaugcccagaagcaucggcggccccgugagcagccacaaccacauccccggcuacaaggugcagaccaacggccccuggaugcaggugccccuggaggugaagagagaggccugccccggcaccagcgugaucaucgacggcaacugcgacggcagaggcaagagcaccagaagcaccaccgacagcggcaaggugauccccgaguggugcugcagaagcugcaccaugccccccgugagcuuccacggcagcgacggcugcugguaccccauggagaucagacccagaaagacccacgagagccaccuggugagaagcugggugaccgccugaggacuaguaauaaggaaacuguaugaaugucugugggcaggaagugaagagauccuucuguaaagguuuuuggaauuaugucugcugaauaauaaacuuuuuugaaauaauaaaucugguagaaaaaugagaucuaaaaaaaaaaaaaaaaaaaaaaaaaaaaaaaaaaaaaaaaaaaaaaaaaaaaaaaaaaaaaaaaugcaucccccccccccccccccccccccccccccccaaaggcucuuuucagagccaccagaauu

SEQ ID NO: 2308 - RNA, 1453 nt, Artificial Sequence
  mRNA product Design b-4 comprising derived and/or modified sequence from YFV__NC_002031.1__SSIgE-NS1 (polyprotein: aa779-1130) (opt4)
gggagagucccgcagucggcguccagcggcucugcuuguucgugugugugucguugcaggccuuauucaagcuuaccauggacuggaccuggauccuguuccugguggccgccgccaccagagugcacagcgaccagggcugcgccaucaacuucggcaagagagagcugaagugcggcgacggcaucuucaucuucagagacagcgacgacuggcugaacaaguacagcuacuaccccgaggaccccgugaagcuggccagcaucgugaaggccagcuucgaggagggcaagugcggccugaacagcguggacagccuggagcacgagauguggagaagcagagccgacgagaucaacgccaucuucgaggagaacgagguggacaucagcgugguggugcaggaccccaagaacguguaccagagaggcacccaccccuucagcagaaucagagacggccugcaguacggcuggaagaccuggggcaagaaccugguguucagccccggcagaaagaacggcagcuucaucaucgacggcaagagcagaaaggagugccccuucagcaacagaguguggaacagcuuccagaucgaggaguucggcaccggcguguucaccaccagaguguacauggacgccguguucgaguacaccaucgacugcgacggcagcauccugggcgccgccgugaacggcaagaagagcgcccacggcagccccaccuucuggaugggcagccacgaggugaacggcaccuggaugauccacacccuggaggcccuggacuacaaggagugcgaguggccccugacccacaccaucggcaccagcguggaggagagcgagauguucaugcccagaagcaucggcggccccgugagcagccacaaccacauccccggcuacaaggugcagaccaacggccccuggaugcaggugccccuggaggugaagagagaggccugccccggcaccagcgugaucaucgacggcaacugcgacggcagaggcaagagcaccagaagcaccaccgacagcggcaaggugauccccgaguggugcugcagaagcugcaccaugccccccgugagcuuccacggcagcgacggcugcugguaccccauggagaucagacccagaaagacccacgagagccaccuggugagaagcugggugaccgccugaggacuaguaauaaggaaacuguaugaaugucugugggcaggaagugaagagauccuucuguaaagguuuuuggaauuaugucugcugaauaauaaacuuuuuugaaauaauaaaucugguagaaaaaugagaucuaaaaaaaaaaaaaaaaaaaaaaaaaaaaaaaaaaaaaaaaaaaaaaaaaaaaaaaaaaaaaaaaugcaucccccccccccccccccccccccccccccccaaaggcucuuuucagagccaccagaauu

SEQ ID NO: 2309 - RNA, 1603 nt, Artificial Sequence
  mRNA product Design b-4 comprising derived and/or modified sequence from YFV__NC_002031.1__eSS-NS1-Y (polyprotein: aa758-1177) (opt5)
gggagagucccgcagucggcguccagcggcucugcuuguucgugugugugucguugcaggccuuauucaagcuuaccaugagcauguccaugauccuggugggcgucauuaugauguuccucucucuggggguuggagccgaccagggcugcgcuaucaacuuugggaagagagagcuuaaauguggagauggcauuuucaucuuucgggacagcgaugacuggcugaauaaguacuccuauuaccccgaagauccugugaaacucgccucuauugugaaggcgagcuucgaggaagggaaaugcggacugaacuccgucgacucucuugagcacgaaauguggcgcagcagagcugaugagaucaaugccaucuuugaggaaaacgagguggacauuuccguugugguccaagauccgaagaauguguaucagcggggcacccaucccuucagccgcaucagagacggccugcaguacggguggaagacauggggcaaaaaccucguguuuucuccuggacggaagaauggguccuucauuaucgauggaaaaagccgcaaggaaugucccuuuucuaacagaguguggaacuccuuccagauugaggaguuuggcacgggggucuucaccacacggguguauauggacgccguguuugaauacaccaucgauugcgacggaagcauucugggcgcugccgucaauggcaaaaagucugcucacggguccccuacauucuggaugggaagccaugagguuaauggcaccuggaugauccacacacuggaagcccucgacuauaaggagugugaauggccccugacccauacgaucgggaccuccguggaggagucugaaauguucaugccucgcagcauuggaggcccgguguccagccacaaccacauccccggguacaaaguccaaacaaauggaccuuggaugcagguuccccuugagguuaagagagaagcgugcccuggcaccucugugauuaucgauggcaacugugacgggcggggaaaauccacacgcagcaccacggauucuggcaaggucauucccgaguggugcuguagaagcugcacaaugccgccuguguccuuucaugggucugacggauguugguaccccauggaaauccggccucgcaaaacccacgagagccaucugguuagauccugggugacagccggcgagauccacgcuguccccuucgggcucgugagcaugaugauugccauggaagucgugcugcggaagagacagggccccaaacagaugcuuguuggaggcgugguccugcucggggcuaugcuggugggacaaguuaccugaggacuaguaauaaggaaacuguaugaaugucugugggcaggaagugaagagauccuucuguaaagguuuuuggaauuaugucugcugaauaauaaacuuuuuugaaauaauaaaucugguagaaaaaugagaucuaaaaaaaaaaaaaaaaaaaaaaaaaaaaaaaaaaaaaaaaaaaaaaaaaaaaaaaaaaaaaaaaugcaucccccccccccccccccccccccccccccccaaaggcucuuuucagagccaccagaauu

SEQ ID NO: 2310 - RNA, 1462 nt, Artificial Sequence
  mRNA product Design b-4 comprising derived and/or modified sequence from YFV__NC_002031.1__eSS-NS1 (polyprotein: aa758-1130) (opt5)
gggagagucccgcagucggcguccagcggcucugcuuguucgugugugugucguugcaggccuuauucaagcuuaccaugagcauguccaugauccuggugggcgucauuaugauguuccucucucuggggguuggagccgaccagggcugcgcuaucaacuuugggaagagagagcuuaaauguggagauggcauuuucaucuuucgggacagcgaugacuggcugaauaaguacuccuauuaccccgaagauccugugaaacucgccucuauugugaaggcgagcuucgaggaagggaaaugcggacugaacuccgucgacucucuugagcacgaaauguggcgcagcagagcugaugagaucaaugccaucuuugaggaaaacgagguggacauuuccguugugguccaagauccgaagaauguguaucagcggggcacccaucccuucagccgcaucagagacggccugcaguacggguggaagacauggggcaaaaaccucguguuuucuccuggacggaagaauggguccuucauuaucgauggaaaaagccgcaaggaaugucccuuuucuaacagaguguggaacuccuuccagauugaggaguuuggcacgggggucuucaccacacggguguauauggacgccguguuugaauacaccaucgauugcgacggaagcauucugggcgcugccgucaauggcaaaaagucugcucacggguccccuacauucuggaugggaagccaugagguuaauggcaccuggaugauccacacacuggaagcccucgacuauaaggagugugaauggccccugacccauacgaucgggaccuccguggaggagucugaaauguucaugccucgcagcauuggaggcccgguguccagccacaaccacauccccggguacaaaguccaaacaaauggaccuuggaugcagguuccccuugagguuaagagagaagcgugcccuggcaccucugugauuaucgauggcaacugugacgggcggggaaaauccacacgcagcaccacggauucuggcaaggucauucccgaguggugcuguagaagcugcacaaugccgccuguguccuuucaugggucugacggauguugguaccccauggaaauccggccucgcaaaacccacgagagccaucugguuagauccugggugacagccugaggacuaguaauaaggaaacuguaugaaugucugugggcaggaagugaagagauccuucuguaaagguuuuuggaauuaugucugcugaauaauaaacuuuuuugaaauaauaaaucugguagaaaaaugagaucuaaaaaaaaaaaaaaaaaaaaaaaaaaaaaaaaaaaaaaaaaaaaaaaaaaaaaaaaaaaaaaaaugcaucccccccccccccccccccccccccccccccaaaggcucuuuucagagccaccagaauu

SEQ ID NO: 2311 - RNA, 1453 nt, Artificial Sequence
  mRNA product Design b-4 comprising derived and/or modified sequence from YFV__NC_002031.1__SSIgE-NS1 (polyprotein: aa779-1130) (opt5)
gggagagucccgcagucggcguccagcggcucugcuuguucgugugugugucguugcaggccuuauucaagcuuaccauggacuggaccuggauccuguuccucguggccgcugccacaagaguccacagcgaccagggcugcgcuaucaacuuugggaagagagagcuuaaauguggagauggcauuuucaucuuucgggacagcgaugacuggcugaauaaguacuccuauuaccccgaagauccugugaaacucgccucuauugugaaggcgagcuucgaggaagggaaaugcggacugaacuccgucgacucucuugagcacgaaauguggcgcagcagagcugaugagaucaaugccaucuuugaggaaaacgagguggacauuuccguugugguccaagauccgaagaauguguaucagcggggcacccaucccuucagccgcaucagagacggccugcaguacggguggaagacauggggcaaaaaccucguguuuucuccuggacggaagaauggguccuucauuaucgauggaaaaagccgcaaggaaugucccuuuucuaacagaguguggaacuccuuccagauugaggaguuuggcacgggggucuucaccacacggguguauauggacgccguguuugaauacaccaucgauugcgacggaagcauucugggcgcugccgucaauggcaaaaagucugcucacggguccccuacauucuggaugggaagccaugagguuaauggcaccuggaugauccacacacuggaagcccucgacuauaaggagugugaauggccccugacccauacgaucgggaccuccguggaggagucugaaauguucaugccucgcagcauuggaggcccgguguccagccacaaccacauccccggguacaaaguccaaacaaauggaccuuggaugcagguuccccuugagguuaagagagaagcgugcccuggcaccucugugauuaucgauggcaacugugacgggcggggaaaauccacacgcagcaccacggauucuggcaaggucauucccgaguggugcuguagaagcugcacaaugccgccuguguccuuucaugggucugacggauguugguaccccauggaaauccggccucgcaaaacccacgagagccaucugguuagauccugggugacagccugaggacuaguaauaaggaaacuguaugaaugucugugggcaggaagugaagagauccuucuguaaagguuuuuggaauuaugucugcugaauaauaaacuuuuuugaaauaauaaaucugguagaaaaaugagaucuaaaaaaaaaaaaaaaaaaaaaaaaaaaaaaaaaaaaaaaaaaaaaaaaaaaaaaaaaaaaaaaaugcaucccccccccccccccccccccccccccccccaaaggcucuuuucagagccaccagaauu

SEQ ID NO: 2312 - RNA, 1603 nt, Artificial Sequence
  mRNA product Design b-4 comprising derived and/or modified sequence from YFV__NC_002031.1__eSS-NS1-Y (polyprotein: aa758-1177) (opt6)
gggagagucccgcagucggcguccagcggcucugcuuguucgugugugugucguugcaggccuuauucaagcuuaccaugucaaugaguaugauauuaguagggguaauaaugauguuccuuagcuuaggaguaggagcagaucaaggaugugcaauaaauuuuggaaaaagagaacuaaaaugcggagacgguauauuuauauuuagagauagugaugauuggcuaaauaaauauaguuacuauccagaagauccaguuaaauuagccucaauaguaaaagcuagcuuugaagaaggaaaauguggacuaaauucaguagacagucuagaacacgaaauguggagaucaagggcagaugaaauaaaugcaaucuuugaagaaaaugaaguggauauaucagugguaguacaagauccaaaaaauguguaccaaagaggaacacauccauuuaguaggauaagagauggauuacaauauggauggaaaacauggggaaaaaauuuaguauuuaguccaggaagaaaaaauggaucauuuauaauagaugggaaaagccgaaaagaauguccauuuucaaacagaguauggaacucauuucaaauugaagaauuuggaacaggaguauuuacaacaagaguauauauggaugcaguauuugaauacaccauagauugugauggaaguauauuaggagcagcaguaaaugggaaaaaaagcgcucacggaaguccaacguuuuggaugggaucacacgagguaaauggcacguggaugauacauacuuuagaagcauuagauuacaaagaaugugaauggccauuaacucauacaauagguacaagcguagaagaaagugagauguuuaugccacguucaaucggggggccaguaucaagucauaaccauauaccaggauauaaaguacaaacgaauggaccuuggaugcaaguaccacuagaaguaaaacgagaagcaugcccaggaacgucaguaauaauagauggaaauugugauggcagggguaaaagcacaagaucaacaacagauucaggaaaaguaauaccugaaugguguuguagaaguuguacaaugccaccaguaucauuccauggaagugauggaugcugguauccaauggaaauuagaccaagaaaaacucaugaaagucauuuaguaagaucuuggguaacugcaggagaaauacaugcaguaccauuugguuuaguaaguaugaugauagcaauggaaguaguucuaagaaaaaggcaagggccuaaacaaaugcuagugggaggaguaguauugcuaggugcaauguuaguaggccaaguaaccugaggacuaguaauaaggaaacuguaugaaugucugugggcaggaagugaagagauccuucuguaaagguuuuuggaauuaugucugcugaauaauaaacuuuuuugaaauaauaaaucugguagaaaaaugagaucuaaaaaaaaaaaaaaaaaaaaaaaaaaaaaaaaaaaaaaaaaaaaaaaaaaaaaaaaaaaaaaaaugcaucccccccccccccccccccccccccccccccaaaggcucuuuucagagccaccagaauu

SEQ ID NO: 2313 - RNA, 1462 nt, Artificial Sequence
  mRNA product Design b-4 comprising derived and/or modified sequence from YFV__NC_002031.1__eSS-NS1 (polyprotein: aa758-1130) (opt6)
gggagagucccgcagucggcguccagcggcucugcuuguucgugugugugucguugcaggccuuauucaagcuuaccaugucaaugaguaugauauuaguagggguaauaaugauguuccuuagcuuaggaguaggagcagaucaaggaugugcaauaaauuuuggaaaaagagaacuaaaaugcggagacgguauauuuauauuuagagauagugaugauuggcuaaauaaauauaguuacuauccagaagauccaguuaaauuagccucaauaguaaaagcuagcuuugaagaaggaaaauguggacuaaauucaguagacagucuagaacacgaaauguggagaucaagggcagaugaaauaaaugcaaucuuugaagaaaaugaaguggauauaucagugguaguacaagauccaaaaaauguguaccaaagaggaacacauccauuuaguaggauaagagauggauuacaauauggauggaaaacauggggaaaaaauuuaguauuuaguccaggaagaaaaaauggaucauuuauaauagaugggaaaagccgaaaagaauguccauuuucaaacagaguauggaacucauuucaaauugaagaauuuggaacaggaguauuuacaacaagaguauauauggaugcaguauuugaauacaccauagauugugauggaaguauauuaggagcagcaguaaaugggaaaaaaagcgcucacggaaguccaacguuuuggaugggaucacacgagguaaauggcacguggaugauacauacuuuagaagcauuagauuacaaagaaugugaauggccauuaacucauacaauagguacaagcguagaagaaagugagauguuuaugccacguucaaucggggggccaguaucaagucauaaccauauaccaggauauaaaguacaaacgaauggaccuuggaugcaaguaccacuagaaguaaaacgagaagcaugcccaggaacgucaguaauaauagauggaaauugugauggcagggguaaaagcacaagaucaacaacagauucaggaaaaguaauaccugaaugguguuguagaaguuguacaaugccaccaguaucauuccauggaagugauggaugcugguauccaauggaaauuagaccaagaaaaacucaugaaagucauuuaguaagaucuuggguaacugcaugaggacuaguaauaaggaaacuguaugaaugucugugggcaggaagugaagagauccuucuguaaagguuuuuggaauuaugucugcugaauaauaaacuuuuuugaaauaauaaaucugguagaaaaaugagaucuaaaaaaaaaaaaaaaaaaaaaaaaaaaaaaaaaaaaaaaaaaaaaaaaaaaaaaaaaaaaaaaaugcaucccccccccccccccccccccccccccccccaaaggcucuuuucagagccaccagaauu

SEQ ID NO: 2314 - RNA, 1453 nt, Artificial Sequence
  mRNA product Design b-4 comprising derived and/or modified sequence from YFV__NC_002031.1__SSIgE-NS1 (polyprotein: aa779-1130) (opt6)
gggagagucccgcagucggcguccagcggcucugcuuguucgugugugugucguugcaggccuuauucaagcuuaccauggacuggacauggauauuauuuuuaguagcagcagcaacaagaguacauucagaucaaggaugugcaauaaauuuuggaaaaagagaacuaaaaugcggagacgguauauuuauauuuagagauagugaugauuggcuaaauaaauauaguuacuauccagaagauccaguuaaauuagccucaauaguaaaagcuagcuuugaagaaggaaaauguggacuaaauucaguagacagucuagaacacgaaauguggagaucaagggcagaugaaauaaaugcaaucuuugaagaaaaugaaguggauauaucagugguaguacaagauccaaaaaauguguaccaaagaggaacacauccauuuaguaggauaagagauggauuacaauauggauggaaaacauggggaaaaaauuuaguauuuaguccaggaagaaaaaauggaucauuuauaauagaugggaaaagccgaaaagaauguccauuuucaaacagaguauggaacucauuucaaauugaagaauuuggaacaggaguauuuacaacaagaguauauauggaugcaguauuugaauacaccauagauugugauggaaguauauuaggagcagcaguaaaugggaaaaaaagcgcucacggaaguccaacguuuuggaugggaucacacgagguaaauggcacguggaugauacauacuuuagaagcauuagauuacaaagaaugugaauggccauuaacucauacaauagguacaagcguagaagaaagugagauguuuaugccacguucaaucggggggccaguaucaagucauaaccauauaccaggauauaaaguacaaacgaauggaccuuggaugcaaguaccacuagaaguaaaacgagaagcaugcccaggaacgucaguaauaauagauggaaauugugauggcagggguaaaagcacaagaucaacaacagauucaggaaaaguaauaccugaaugguguuguagaaguuguacaaugccaccaguaucauuccauggaagugauggaugcugguauccaauggaaauuagaccaagaaaaacucaugaaagucauuuaguaagaucuuggguaacugcaugaggacuaguaauaaggaaacuguaugaaugucugugggcaggaagugaagagauccuucuguaaagguuuuuggaauuaugucugcugaauaauaaacuuuuuugaaauaauaaaucugguagaaaaaugagaucuaaaaaaaaaaaaaaaaaaaaaaaaaaaaaaaaaaaaaaaaaaaaaaaaaaaaaaaaaaaaaaaaugcaucccccccccccccccccccccccccccccccaaaggcucuuuucagagccaccagaauu

SEQ ID NO: 2315 - RNA, 1603 nt, Artificial Sequence
  mRNA product Design b-4 comprising derived and/or modified sequence from YFV__NC_002031.1__eSS-NS1-Y (polyprotein: aa758-1177) (opt11)
gggagagucccgcagucggcguccagcggcucugcuuguucgugugugugucguugcaggccuuauucaagcuuaccaugagcaugagcaugaucuugguaggggucauaaugauguucuugagccuagggguaggcgcagaccagggaugcgcgauaaacuucggcaaacgcgaacucaaaugcggggacggaaucuucaucuuucgcgacagugacgacuggcuaaacaaguacaguuacuacccggaagaccccguaaaacuagccucaauaguaaaagcgagcuucgaagaaggaaagugcgggcuaaacagcguggacucccuagagcacgagauguggaggucgagagcggacgagaucaacgccauauucgaagaaaaugaaguagacauaagcguagucguacaagaucccaaaaacguguaccagcgcggaacccaccccuucagcaggaucagagacgggcuacaauacggauggaagacauggggcaaaaaccuggucuucagcccgggcaggaaaaacggaucguucaucaucgauggcaaaagccgaaaggagugcccguucucaaacaggguauggaacucguuccagaucgaagaguucggcacaggcgucuucacgacaagagucuacauggacgcaguguucgaauacacaaucgacugcgacggcuccauacugggcgcagccgugaacgggaaaaagagcgcacacggaagcccgaccuuuuggauggguucgcacgaggugaacggaacauggaugauacacaccuuagaagcacucgauuacaaagaaugcgaauggcccuuaacccacaccaucgguacguccguagaagaaagcgaaauguucaugccgcgcucaaucggcggcccagucucgagccacaaccacaucccgggcuauaaaguacaaacaaacgggccauggaugcagguaccccucgaggucaagcgcgaagccugccccggaaccucggucaucaucgacggcaacugcgacggcaggggaaaaagcacgcgcucaaccacggacucgggaaagguaauaccagaguggugcugcaggagcugcaccaugccaccgguaucguuccacggcucagacggaugcugguacccgauggaaaucagacccagaaaaacgcacgagagccaccucguacgcucauggguaaccgcaggcgagauccacgccgugccauuuggacuggucucaaugaugauagcgauggaggucgugcucaggaagaggcaagggcccaagcaaaugcucguaggaggaguaguacuccugggcgcaaugcuggucggacaggugaccugaggacuaguaauaaggaaacuguaugaaugucugugggcaggaagugaagagauccuucuguaaagguuuuuggaauuaugucugcugaauaauaaacuuuuuugaaauaauaaaucugguagaaaaaugagaucuaaaaaaaaaaaaaaaaaaaaaaaaaaaaaaaaaaaaaaaaaaaaaaaaaaaaaaaaaaaaaaaaugcaucccccccccccccccccccccccccccccccaaaggcucuuuucagagccaccagaauu

SEQ ID NO: 2316 - RNA, 1462 nt, Artificial Sequence
  mRNA product Design b-4 comprising derived and/or modified sequence from YFV__NC_002031.1__eSS-NS1 (polyprotein: aa758-1130) (opt11)
gggagagucccgcagucggcguccagcggcucugcuuguucgugugugugucguugcaggccuuauucaagcuuaccaugagcaugagcaugaucuugguaggggucauaaugauguucuugagccuagggguaggcgcagaccagggaugcgcgauaaacuucggcaaacgcgaacucaaaugcggggacggaaucuucaucuuucgcgacagugacgacuggcuaaacaaguacaguuacuacccggaagaccccguaaaacuagccucaauaguaaaagcgagcuucgaagaaggaaagugcgggcuaaacagcguggacucccuagagcacgagauguggaggucgagagcggacgagaucaacgccauauucgaagaaaaugaaguagacauaagcguagucguacaagaucccaaaaacguguaccagcgcggaacccaccccuucagcaggaucagagacgggcuacaauacggauggaagacauggggcaaaaaccuggucuucagcccgggcaggaaaaacggaucguucaucaucgauggcaaaagccgaaaggagugcccguucucaaacaggguauggaacucguuccagaucgaagaguucggcacaggcgucuucacgacaagagucuacauggacgcaguguucgaauacacaaucgacugcgacggcuccauacugggcgcagccgugaacgggaaaaagagcgcacacggaagcccgaccuuuuggauggguucgcacgaggugaacggaacauggaugauacacaccuuagaagcacucgauuacaaagaaugcgaauggcccuuaacccacaccaucgguacguccguagaagaaagcgaaauguucaugccgcgcucaaucggcggcccagucucgagccacaaccacaucccgggcuauaaaguacaaacaaacgggccauggaugcagguaccccucgaggucaagcgcgaagccugccccggaaccucggucaucaucgacggcaacugcgacggcaggggaaaaagcacgcgcucaaccacggacucgggaaagguaauaccagaguggugcugcaggagcugcaccaugccaccgguaucguuccacggcucagacggaugcugguacccgauggaaaucagacccagaaaaacgcacgagagccaccucguacgcucauggguaaccgcaugaggacuaguaauaaggaaacuguaugaaugucugugggcaggaagugaagagauccuucuguaaagguuuuuggaauuaugucugcugaauaauaaacuuuuuugaaauaauaaaucugguagaaaaaugagaucuaaaaaaaaaaaaaaaaaaaaaaaaaaaaaaaaaaaaaaaaaaaaaaaaaaaaaaaaaaaaaaaaugcaucccccccccccccccccccccccccccccccaaaggcucuuuucagagccaccagaauu

SEQ ID NO: 2317 - RNA, 1453 nt, Artificial Sequence
  mRNA product Design b-4 comprising derived and/or modified sequence from YFV__NC_002031.1__SSIgE-NS1 (polyprotein: aa779-1130) (opt11)
gggagagucccgcagucggcguccagcggcucugcuuguucgugugugugucguugcaggccuuauucaagcuuaccauggauuggacguggauacucuuucucguggccgcggccacgcgcgugcacucggaccagggaugcgcgauaaacuucggcaaacgcgaacucaaaugcggggacggaaucuucaucuuucgcgacagugacgacuggcuaaacaaguacaguuacuacccggaagaccccguaaaacuagccucaauaguaaaagcgagcuucgaagaaggaaagugcgggcuaaacagcguggacucccuagagcacgagauguggaggucgagagcggacgagaucaacgccauauucgaagaaaaugaaguagacauaagcguagucguacaagaucccaaaaacguguaccagcgcggaacccaccccuucagcaggaucagagacgggcuacaauacggauggaagacauggggcaaaaaccuggucuucagcccgggcaggaaaaacggaucguucaucaucgauggcaaaagccgaaaggagugcccguucucaaacaggguauggaacucguuccagaucgaagaguucggcacaggcgucuucacgacaagagucuacauggacgcaguguucgaauacacaaucgacugcgacggcuccauacugggcgcagccgugaacgggaaaaagagcgcacacggaagcccgaccuuuuggauggguucgcacgaggugaacggaacauggaugauacacaccuuagaagcacucgauuacaaagaaugcgaauggcccuuaacccacaccaucgguacguccguagaagaaagcgaaauguucaugccgcgcucaaucggcggcccagucucgagccacaaccacaucccgggcuauaaaguacaaacaaacgggccauggaugcagguaccccucgaggucaagcgcgaagccugccccggaaccucggucaucaucgacggcaacugcgacggcaggggaaaaagcacgcgcucaaccacggacucgggaaagguaauaccagaguggugcugcaggagcugcaccaugccaccgguaucguuccacggcucagacggaugcugguacccgauggaaaucagacccagaaaaacgcacgagagccaccucguacgcucauggguaaccgcaugaggacuaguaauaaggaaacuguaugaaugucugugggcaggaagugaagagauccuucuguaaagguuuuuggaauuaugucugcugaauaauaaacuuuuuugaaauaauaaaucugguagaaaaaugagaucuaaaaaaaaaaaaaaaaaaaaaaaaaaaaaaaaaaaaaaaaaaaaaaaaaaaaaaaaaaaaaaaaugcaucccccccccccccccccccccccccccccccaaaggcucuuuucagagccaccagaauu

SEQ ID NO: 2318 - RNA, 1552 nt, Artificial Sequence
  mRNA product Design c-5 comprising derived and/or modified sequence from YFV__NC_002031.1__eSS-NS1-Y (polyprotein: aa758-1177) (wt)
gggagagcggcucggccauuuugucccagucaguccggaggcugcggcugcagaaguaccgccugcggaguaacugcaaagaagcuuaccauguccaugagcaugaucuugguaggagugaucaugauguuuuugucucuaggaguuggggcggaucaaggaugcgccaucaacuuuggcaagagagagcucaagugcggagaugguaucuucauauuuagagacucugaugacuggcugaacaaguacucauacuauccagaagauccugugaagcuugcaucaauagugaaagccucuuuugaagaagggaaguguggccuaaauucaguugacucccuugagcaugagauguggagaagcagggcagaugagaucaaugccauuuuugaggaaaacgagguggacauuucuguugucgugcaggauccaaagaauguuuaccagagaggaacucauccauuuuccagaauucgggauggucugcaguaugguuggaagacuugggguaagaaccuuguguucuccccagggaggaagaauggaagcuucaucauagauggaaaguccaggaaagaaugcccguuuucaaaccgggucuggaauucuuuccagauagaggaguuugggacgggaguguucaccacacgcguguacauggacgcagucuuugaauacaccauagacugcgauggaucuaucuugggugcagcggugaacggaaaaaagagugcccauggcucuccaacauuuuggaugggaagucaugaaguaaaugggacauggaugauccacaccuuggaggcauuagauuacaaggagugugaguggccacugacacauacgauuggaacaucaguugaagagagugaaauguucaugccgagaucaaucggaggcccaguuagcucucacaaucauaucccuggauacaagguucagacgaacggaccuuggaugcagguaccacuagaagugaagagagaagcuugcccagggacuagcgugaucauugauggcaacugugauggacggggaaaaucaaccagauccaccacggauagcgggaaaguuauuccugaaugguguugccgcuccugcacaaugccgccugugagcuuccaugguagugauggguguugguaucccauggaaauuaggccaaggaaaacgcaugaaagccaucuggugcgcuccuggguuacagcuggagaaauacaugcugucccuuuugguuuggugagcaugaugauagcaauggaagugguccuaaggaaaagacagggaccaaagcaaauguugguuggaggaguagugcucuugggagcaaugcuggucgggcaaguaacuugaggacuagucccuguucccagagcccacuuuuuuuucuuuuuuugaaauaaaauagccugucuuucagaucuaaaaaaaaaaaaaaaaaaaaaaaaaaaaaaaaaaaaaaaaaaaaaaaaaaaaaaaaaaaaaaaaugcaucccccccccccccccccccccccccccccccaaaggcucuuuucagagccaccagaauu

SEQ ID NO: 2319 - RNA, 1411 nt, Artificial Sequence
  mRNA product Design c-5 comprising derived and/or modified sequence from YFV__NC_002031.1__eSS-NS1 (polyprotein: aa758-1130) (wt)
gggagagcggcucggccauuuugucccagucaguccggaggcugcggcugcagaaguaccgccugcggaguaacugcaaagaagcuuaccauguccaugagcaugaucuugguaggagugaucaugauguuuuugucucuaggaguuggggcggaucaaggaugcgccaucaacuuuggcaagagagagcucaagugcggagaugguaucuucauauuuagagacucugaugacuggcugaacaaguacucauacuauccagaagauccugugaagcuugcaucaauagugaaagccucuuuugaagaagggaaguguggccuaaauucaguugacucccuugagcaugagauguggagaagcagggcagaugagaucaaugccauuuuugaggaaaacgagguggacauuucuguugucgugcaggauccaaagaauguuuaccagagaggaacucauccauuuuccagaauucgggauggucugcaguaugguuggaagacuugggguaagaaccuuguguucuccccagggaggaagaauggaagcuucaucauagauggaaaguccaggaaagaaugcccguuuucaaaccgggucuggaauucuuuccagauagaggaguuugggacgggaguguucaccacacgcguguacauggacgcagucuuugaauacaccauagacugcgauggaucuaucuugggugcagcggugaacggaaaaaagagugcccauggcucuccaacauuuuggaugggaagucaugaaguaaaugggacauggaugauccacaccuuggaggcauuagauuacaaggagugugaguggccacugacacauacgauuggaacaucaguugaagagagugaaauguucaugccgagaucaaucggaggcccaguuagcucucacaaucauaucccuggauacaagguucagacgaacggaccuuggaugcagguaccacuagaagugaagagagaagcuugcccagggacuagcgugaucauugauggcaacugugauggacggggaaaaucaaccagauccaccacggauagcgggaaaguuauuccugaaugguguugccgcuccugcacaaugccgccugugagcuuccaugguagugauggguguugguaucccauggaaauuaggccaaggaaaacgcaugaaagccaucuggugcgcuccuggguuacagcuugaggacuagucccuguucccagagcccacuuuuuuuucuuuuuuugaaauaaaauagccugucuuucagaucuaaaaaaaaaaaaaaaaaaaaaaaaaaaaaaaaaaaaaaaaaaaaaaaaaaaaaaaaaaaaaaaaugcaucccccccccccccccccccccccccccccccaaaggcucuuuucagagccaccagaauu

SEQ ID NO: 2320 - RNA, 1402 nt, Artificial Sequence
  mRNA product Design c-5 comprising derived and/or modified sequence from YFV__NC_002031.1__SSIgE-NS1 (polyprotein: aa779-1130) (wt)
gggagagcggcucggccauuuugucccagucaguccggaggcugcggcugcagaaguaccgccugcggaguaacugcaaagaagcuuaccauggacuggaccuggauccuguuccucguggccgccgcgacccgcguccacagcgaucaaggaugcgccaucaacuuuggcaagagagagcucaagugcggagaugguaucuucauauuuagagacucugaugacuggcugaacaaguacucauacuauccagaagauccugugaagcuugcaucaauagugaaagccucuuuugaagaagggaaguguggccuaaauucaguugacucccuugagcaugagauguggagaagcagggcagaugagaucaaugccauuuuugaggaaaacgagguggacauuucuguugucgugcaggauccaaagaauguuuaccagagaggaacucauccauuuuccagaauucgggauggucugcaguaugguuggaagacuugggguaagaaccuuguguucuccccagggaggaagaauggaagcuucaucauagauggaaaguccaggaaagaaugcccguuuucaaaccgggucuggaauucuuuccagauagaggaguuugggacgggaguguucaccacacgcguguacauggacgcagucuuugaauacaccauagacugcgauggaucuaucuugggugcagcggugaacggaaaaaagagugcccauggcucuccaacauuuuggaugggaagucaugaaguaaaugggacauggaugauccacaccuuggaggcauuagauuacaaggagugugaguggccacugacacauacgauuggaacaucaguugaagagagugaaauguucaugccgagaucaaucggaggcccaguuagcucucacaaucauaucccuggauacaagguucagacgaacggaccuuggaugcagguaccacuagaagugaagagagaagcuugcccagggacuagcgugaucauugauggcaacugugauggacggggaaaaucaaccagauccaccacggauagcgggaaaguuauuccugaaugguguugccgcuccugcacaaugccgccugugagcuuccaugguagugauggguguugguaucccauggaaauuaggccaaggaaaacgcaugaaagccaucuggugcgcuccuggguuacagcuugaggacuagucccuguucccagagcccacuuuuuuuucuuuuuuugaaauaaaauagccugucuuucagaucuaaaaaaaaaaaaaaaaaaaaaaaaaaaaaaaaaaaaaaaaaaaaaaaaaaaaaaaaaaaaaaaaugcaucccccccccccccccccccccccccccccccaaaggcucuuuucagagccaccagaauu

SEQ ID NO: 2321 - RNA, 1552 nt, Artificial Sequence
  mRNA product Design c-5 comprising derived and/or modified sequence from YFV__NC_002031.1__eSS-NS1-Y (polyprotein: aa758-1177) (opt1)
gggagagcggcucggccauuuugucccagucaguccggaggcugcggcugcagaaguaccgccugcggaguaacugcaaagaagcuuaccaugagcauguccaugauccuggugggcgucaucaugauguuccucagccugggggugggcgccgaccaggggugcgccaucaacuucggcaagcgcgagcugaagugcggggacggcaucuucaucuuccgggacuccgacgacuggcucaacaaguacagcuacuaccccgaggacccggugaagcuggcguccaucgucaaggccagcuucgaggagggcaagugcgggcugaacuccguggacagccucgagcacgagauguggcgcucccgggccgacgagaucaacgccaucuucgaggagaacgagguggacaucagcgucguggugcaggaccccaagaacgucuaccagcgcggcacccaccccuucucccggauccgcgacgggcugcaguacggcuggaagaccugggggaagaaccugguguucagccccggccggaagaacggcuccuucaucaucgacggcaagagccgcaaggagugcccguucuccaaccggguguggaacagcuuccagaucgaggaguucgggacgggggucuucaccacccgcguguacauggacgccguguucgaguacaccaucgacugcgacggcuccauccucggcgcggccgucaacgggaagaaguccgcccacggcagccccacguucuggauggggagccacgaggugaacggcaccuggaugauccacacccuggaggcccuggacuacaaggagugcgaguggccccucacccacacgaucgggaccagcguggaggaguccgagauguucaugccccggagcaucggcggcccggucuccagccacaaccacauccccggguacaaggugcagaccaacggccccuggaugcaggucccccuggaggugaagcgcgaggcgugcccggggaccuccgugaucaucgacggcaacugcgacgggcggggcaagagcacgcgcuccaccaccgacagcggcaaggugauccccgaguggugcugccgguccugcaccaugccgcccgucagcuuccacggguccgacggcugcugguaccccauggagauccgcccccggaagacgcacgagagccaccuggugcgcuccugggucaccgccggggagauccacgccgugcccuucggccucgugagcaugaugaucgccauggaggucgugcugcggaagcgccaggggcccaagcagaugcuggugggcggcgucgugcuccugggggccaugcuggugggccaggucaccugaggacuagucccuguucccagagcccacuuuuuuuucuuuuuuugaaauaaaauagccugucuuucagaucuaaaaaaaaaaaaaaaaaaaaaaaaaaaaaaaaaaaaaaaaaaaaaaaaaaaaaaaaaaaaaaaaugcaucccccccccccccccccccccccccccccccaaaggcucuuuucagagccaccagaauu

SEQ ID NO: 2322 - RNA, 1411 nt, Artificial Sequence
  mRNA product Design c-5 comprising derived and/or modified sequence from YFV__NC_002031.1__eSS-NS1 (polyprotein: aa758-1130) (opt1)
gggagagcggcucggccauuuugucccagucaguccggaggcugcggcugcagaaguaccgccugcggaguaacugcaaagaagcuuaccaugagcauguccaugauccuggugggcgucaucaugauguuccucagccugggggugggcgccgaccaggggugcgccaucaacuucggcaagcgcgagcugaagugcggggacggcaucuucaucuuccgggacuccgacgacuggcucaacaaguacagcuacuaccccgaggacccggugaagcuggcguccaucgucaaggccagcuucgaggagggcaagugcgggcugaacuccguggacagccucgagcacgagauguggcgcucccgggccgacgagaucaacgccaucuucgaggagaacgagguggacaucagcgucguggugcaggaccccaagaacgucuaccagcgcggcacccaccccuucucccggauccgcgacgggcugcaguacggcuggaagaccugggggaagaaccugguguucagccccggccggaagaacggcuccuucaucaucgacggcaagagccgcaaggagugcccguucuccaaccggguguggaacagcuuccagaucgaggaguucgggacgggggucuucaccacccgcguguacauggacgccguguucgaguacaccaucgacugcgacggcuccauccucggcgcggccgucaacgggaagaaguccgcccacggcagccccacguucuggauggggagccacgaggugaacggcaccuggaugauccacacccuggaggcccuggacuacaaggagugcgaguggccccucacccacacgaucgggaccagcguggaggaguccgagauguucaugccccggagcaucggcggcccggucuccagccacaaccacauccccggguacaaggugcagaccaacggccccuggaugcaggucccccuggaggugaagcgcgaggcgugcccggggaccuccgugaucaucgacggcaacugcgacgggcggggcaagagcacgcgcuccaccaccgacagcggcaaggugauccccgaguggugcugccgguccugcaccaugccgcccgucagcuuccacggguccgacggcugcugguaccccauggagauccgcccccggaagacgcacgagagccaccuggugcgcuccugggucaccgccugaggacuagucccuguucccagagcccacuuuuuuuucuuuuuuugaaauaaaauagccugucuuucagaucuaaaaaaaaaaaaaaaaaaaaaaaaaaaaaaaaaaaaaaaaaaaaaaaaaaaaaaaaaaaaaaaaugcaucccccccccccccccccccccccccccccccaaaggcucuuuucagagccaccagaauu

SEQ ID NO: 2323 - RNA, 1402 nt, Artificial Sequence
  mRNA product Design c-5 comprising derived and/or modified sequence from YFV__NC_002031.1__SSIgE-NS1 (polyprotein: aa779-1130) (opt1)
gggagagcggcucggccauuuugucccagucaguccggaggcugcggcugcagaaguaccgccugcggaguaacugcaaagaagcuuaccauggacuggaccuggauccuguuccucguggccgccgcgacccgcguccacagcgaccaggggugcgccaucaacuucggcaagcgcgagcugaagugcggggacggcaucuucaucuuccgggacuccgacgacuggcucaacaaguacagcuacuaccccgaggacccggugaagcuggcguccaucgucaaggccagcuucgaggagggcaagugcgggcugaacuccguggacagccucgagcacgagauguggcgcucccgggccgacgagaucaacgccaucuucgaggagaacgagguggacaucagcgucguggugcaggaccccaagaacgucuaccagcgcggcacccaccccuucucccggauccgcgacgggcugcaguacggcuggaagaccugggggaagaaccugguguucagccccggccggaagaacggcuccuucaucaucgacggcaagagccgcaaggagugcccguucuccaaccggguguggaacagcuuccagaucgaggaguucgggacgggggucuucaccacccgcguguacauggacgccguguucgaguacaccaucgacugcgacggcuccauccucggcgcggccgucaacgggaagaaguccgcccacggcagccccacguucuggauggggagccacgaggugaacggcaccuggaugauccacacccuggaggcccuggacuacaaggagugcgaguggccccucacccacacgaucgggaccagcguggaggaguccgagauguucaugccccggagcaucggcggcccggucuccagccacaaccacauccccggguacaaggugcagaccaacggccccuggaugcaggucccccuggaggugaagcgcgaggcgugcccggggaccuccgugaucaucgacggcaacugcgacgggcggggcaagagcacgcgcuccaccaccgacagcggcaaggugauccccgaguggugcugccgguccugcaccaugccgcccgucagcuuccacggguccgacggcugcugguaccccauggagauccgcccccggaagacgcacgagagccaccuggugcgcuccugggucaccgccugaggacuagucccuguucccagagcccacuuuuuuuucuuuuuuugaaauaaaauagccugucuuucagaucuaaaaaaaaaaaaaaaaaaaaaaaaaaaaaaaaaaaaaaaaaaaaaaaaaaaaaaaaaaaaaaaaugcaucccccccccccccccccccccccccccccccaaaggcucuuuucagagccaccagaauu

SEQ ID NO: 2324 - RNA, 1552 nt, Artificial Sequence
  mRNA product Design c-5 comprising derived and/or modified sequence from YFV__NC_002031.1__eSS-NS1-Y (polyprotein: aa758-1177) (opt2)
gggagagcggcucggccauuuugucccagucaguccggaggcugcggcugcagaaguaccgccugcggaguaacugcaaagaagcuuaccauguccauguccaugauccucgucggcgucaucaugauguuccucucccucggcgucggcgccgaccagggcugcgccaucaacuucggcaagcgcgagcucaagugcggcgacggcaucuucaucuuccgcgacuccgacgacuggcucaacaaguacuccuacuaccccgaggaccccgucaagcucgccuccaucgucaaggccuccuucgaggagggcaagugcggccucaacuccgucgacucccucgagcacgagauguggcgcucccgcgccgacgagaucaacgccaucuucgaggagaacgaggucgacaucuccgucgucguccaggaccccaagaacgucuaccagcgcggcacccaccccuucucccgcauccgcgacggccuccaguacggcuggaagaccuggggcaagaaccucgucuucucccccggccgcaagaacggcuccuucaucaucgacggcaagucccgcaaggagugccccuucuccaaccgcgucuggaacuccuuccagaucgaggaguucggcaccggcgucuucaccacccgcgucuacauggacgccgucuucgaguacaccaucgacugcgacggcuccauccucggcgccgccgucaacggcaagaaguccgcccacggcucccccaccuucuggaugggcucccacgaggucaacggcaccuggaugauccacacccucgaggcccucgacuacaaggagugcgaguggccccucacccacaccaucggcaccuccgucgaggaguccgagauguucaugccccgcuccaucggcggccccgucuccucccacaaccacauccccggcuacaagguccagaccaacggccccuggaugcaggucccccucgaggucaagcgcgaggccugccccggcaccuccgucaucaucgacggcaacugcgacggccgcggcaaguccacccgcuccaccaccgacuccggcaaggucauccccgaguggugcugccgcuccugcaccaugccccccgucuccuuccacggcuccgacggcugcugguaccccauggagauccgcccccgcaagacccacgagucccaccucguccgcuccugggucaccgccggcgagauccacgccguccccuucggccucgucuccaugaugaucgccauggaggucguccuccgcaagcgccagggccccaagcagaugcucgucggcggcgucguccuccucggcgccaugcucgucggccaggucaccugaggacuagucccuguucccagagcccacuuuuuuuucuuuuuuugaaauaaaauagccugucuuucagaucuaaaaaaaaaaaaaaaaaaaaaaaaaaaaaaaaaaaaaaaaaaaaaaaaaaaaaaaaaaaaaaaaugcaucccccccccccccccccccccccccccccccaaaggcucuuuucagagccaccagaauu

SEQ ID NO: 2325 - RNA, 1411 nt, Artificial Sequence
  mRNA product Design c-5 comprising derived and/or modified sequence from YFV__NC_002031.1__eSS-NS1 (polyprotein: aa758-1130) (opt2)
gggagagcggcucggccauuuugucccagucaguccggaggcugcggcugcagaaguaccgccugcggaguaacugcaaagaagcuuaccauguccauguccaugauccucgucggcgucaucaugauguuccucucccucggcgucggcgccgaccagggcugcgccaucaacuucggcaagcgcgagcucaagugcggcgacggcaucuucaucuuccgcgacuccgacgacuggcucaacaaguacuccuacuaccccgaggaccccgucaagcucgccuccaucgucaaggccuccuucgaggagggcaagugcggccucaacuccgucgacucccucgagcacgagauguggcgcucccgcgccgacgagaucaacgccaucuucgaggagaacgaggucgacaucuccgucgucguccaggaccccaagaacgucuaccagcgcggcacccaccccuucucccgcauccgcgacggccuccaguacggcuggaagaccuggggcaagaaccucgucuucucccccggccgcaagaacggcuccuucaucaucgacggcaagucccgcaaggagugccccuucuccaaccgcgucuggaacuccuuccagaucgaggaguucggcaccggcgucuucaccacccgcgucuacauggacgccgucuucgaguacaccaucgacugcgacggcuccauccucggcgccgccgucaacggcaagaaguccgcccacggcucccccaccuucuggaugggcucccacgaggucaacggcaccuggaugauccacacccucgaggcccucgacuacaaggagugcgaguggccccucacccacaccaucggcaccuccgucgaggaguccgagauguucaugccccgcuccaucggcggccccgucuccucccacaaccacauccccggcuacaagguccagaccaacggccccuggaugcaggucccccucgaggucaagcgcgaggccugccccggcaccuccgucaucaucgacggcaacugcgacggccgcggcaaguccacccgcuccaccaccgacuccggcaaggucauccccgaguggugcugccgcuccugcaccaugccccccgucuccuuccacggcuccgacggcugcugguaccccauggagauccgcccccgcaagacccacgagucccaccucguccgcuccugggucaccgccugaggacuagucccuguucccagagcccacuuuuuuuucuuuuuuugaaauaaaauagccugucuuucagaucuaaaaaaaaaaaaaaaaaaaaaaaaaaaaaaaaaaaaaaaaaaaaaaaaaaaaaaaaaaaaaaaaugcaucccccccccccccccccccccccccccccccaaaggcucuuuucagagccaccagaauu

SEQ ID NO: 2326 - RNA, 1402 nt, Artificial Sequence
  mRNA product Design c-5 comprising derived and/or modified sequence from YFV__NC_002031.1__SSIgE-NS1 (polyprotein: aa779-1130) (opt2)
gggagagcggcucggccauuuugucccagucaguccggaggcugcggcugcagaaguaccgccugcggaguaacugcaaagaagcuuaccauggacuggaccuggauccucuuccucgucgccgccgccacccgcguccacuccgaccagggcugcgccaucaacuucggcaagcgcgagcucaagugcggcgacggcaucuucaucuuccgcgacuccgacgacuggcucaacaaguacuccuacuaccccgaggaccccgucaagcucgccuccaucgucaaggccuccuucgaggagggcaagugcggccucaacuccgucgacucccucgagcacgagauguggcgcucccgcgccgacgagaucaacgccaucuucgaggagaacgaggucgacaucuccgucgucguccaggaccccaagaacgucuaccagcgcggcacccaccccuucucccgcauccgcgacggccuccaguacggcuggaagaccuggggcaagaaccucgucuucucccccggccgcaagaacggcuccuucaucaucgacggcaagucccgcaaggagugccccuucuccaaccgcgucuggaacuccuuccagaucgaggaguucggcaccggcgucuucaccacccgcgucuacauggacgccgucuucgaguacaccaucgacugcgacggcuccauccucggcgccgccgucaacggcaagaaguccgcccacggcucccccaccuucuggaugggcucccacgaggucaacggcaccuggaugauccacacccucgaggcccucgacuacaaggagugcgaguggccccucacccacaccaucggcaccuccgucgaggaguccgagauguucaugccccgcuccaucggcggccccgucuccucccacaaccacauccccggcuacaagguccagaccaacggccccuggaugcaggucccccucgaggucaagcgcgaggccugccccggcaccuccgucaucaucgacggcaacugcgacggccgcggcaaguccacccgcuccaccaccgacuccggcaaggucauccccgaguggugcugccgcuccugcaccaugccccccgucuccuuccacggcuccgacggcugcugguaccccauggagauccgcccccgcaagacccacgagucccaccucguccgcuccugggucaccgccugaggacuagucccuguucccagagcccacuuuuuuuucuuuuuuugaaauaaaauagccugucuuucagaucuaaaaaaaaaaaaaaaaaaaaaaaaaaaaaaaaaaaaaaaaaaaaaaaaaaaaaaaaaaaaaaaaugcaucccccccccccccccccccccccccccccccaaaggcucuuuucagagccaccagaauu

SEQ ID NO: 2327 - RNA, 1552 nt, Artificial Sequence
  mRNA product Design c-5 comprising derived and/or modified sequence from YFV__NC_002031.1__eSS-NS1-Y (polyprotein: aa758-1177) (opt3)
gggagagcggcucggccauuuugucccagucaguccggaggcugcggcugcagaaguaccgccugcggaguaacugcaaagaagcuuaccaugagcauguccaugauccuggugggcgucauuaugauguuccucucucuugggguuggagccgaccaggguugcgcuauaaacuuuggcaagagagagcugaaauguggggauggaaucuucauuuuuagggacucagaugacugguugaauaaguacaguuauuaccccgaagauccugugaaauuagcaagcaucguaaaggccuccuucgaggaaggcaaaugcggucugaacucuguggacucgcuagagcacgaaauguggcggucacgcgcggaugagauuaaugcuaucuuugaggaaaacgaggucgacauaagcgugguugugcaagauccaaagaaugucuaucagcgagggacccauccguucagucguaucagagacggacuccaguacggcuggaagacauggggcaaaaaccugguguuuucccccgggaggaagaauggaucuuucauuaucgaugguaaaagccggaaggaauguccuuuuuccaaccgcguauggaacucauuccagauugaggaguuuggcacugggguuuucacgaccagaguguauauggacgccgucuuugaauacacaaucgauugcgacggaaguauacuuggcgcagccgugaaugguaaaaagagcgcucacgggucuccaacuuucuggaugggaucccaugaggugaauggcaccuggaugauucacacacuggaagcauuggacuauaaggagugugaauggccccucacccauacuaucggcacaucagucgaggagagcgaaauguucaugccuaggaguauugggggaccaguuucuucccacaaccacauccccgguuacaaagugcaaaccaauggcccuuggaugcagguaccacuggaggugaagcgggaagccugcccggggacgagcgucaucauugauggaaacugugacggccgcgguaaaucgacucgaucuaccacagauuccgggaaggugauacccgaguggugcuguagaucaugcacuaugccuccaguuaguuuucauggcagcgacggauguugguaccccauggaaaucaggccucggaaaacccacgagucccaucuggugcguucuugggucacagcuggcgagauucacgccgugccauucgggcucguaagcaugaugaucgcgauggaaguuguguuacgcaagagacagggacccaaacagaugcuggucgguggcgugguccuuuugggggcaaugcuggugggacaaguuaccugaggacuagucccuguucccagagcccacuuuuuuuucuuuuuuugaaauaaaauagccugucuuucagaucuaaaaaaaaaaaaaaaaaaaaaaaaaaaaaaaaaaaaaaaaaaaaaaaaaaaaaaaaaaaaaaaaugcaucccccccccccccccccccccccccccccccaaaggcucuuuucagagccaccagaauu

SEQ ID NO: 2328 - RNA, 1411 nt, Artificial Sequence
  mRNA product Design c-5 comprising derived and/or modified sequence from YFV__NC_002031.1__eSS-NS1 (polyprotein: aa758-1130) (opt3)
gggagagcggcucggccauuuugucccagucaguccggaggcugcggcugcagaaguaccgccugcggaguaacugcaaagaagcuuaccaugagcauguccaugauccuggugggcgucauuaugauguuccucucucuugggguuggagccgaccaggguugcgcuauaaacuuuggcaagagagagcugaaauguggggauggaaucuucauuuuuagggacucagaugacugguugaauaaguacaguuauuaccccgaagauccugugaaauuagcaagcaucguaaaggccuccuucgaggaaggcaaaugcggucugaacucuguggacucgcuagagcacgaaauguggcggucacgcgcggaugagauuaaugcuaucuuugaggaaaacgaggucgacauaagcgugguugugcaagauccaaagaaugucuaucagcgagggacccauccguucagucguaucagagacggacuccaguacggcuggaagacauggggcaaaaaccugguguuuucccccgggaggaagaauggaucuuucauuaucgaugguaaaagccggaaggaauguccuuuuuccaaccgcguauggaacucauuccagauugaggaguuuggcacugggguuuucacgaccagaguguauauggacgccgucuuugaauacacaaucgauugcgacggaaguauacuuggcgcagccgugaaugguaaaaagagcgcucacgggucuccaacuuucuggaugggaucccaugaggugaauggcaccuggaugauucacacacuggaagcauuggacuauaaggagugugaauggccccucacccauacuaucggcacaucagucgaggagagcgaaauguucaugccuaggaguauugggggaccaguuucuucccacaaccacauccccgguuacaaagugcaaaccaauggcccuuggaugcagguaccacuggaggugaagcgggaagccugcccggggacgagcgucaucauugauggaaacugugacggccgcgguaaaucgacucgaucuaccacagauuccgggaaggugauacccgaguggugcuguagaucaugcacuaugccuccaguuaguuuucauggcagcgacggauguugguaccccauggaaaucaggccucggaaaacccacgagucccaucuggugcguucuugggucacagcuugaggacuagucccuguucccagagcccacuuuuuuuucuuuuuuugaaauaaaauagccugucuuucagaucuaaaaaaaaaaaaaaaaaaaaaaaaaaaaaaaaaaaaaaaaaaaaaaaaaaaaaaaaaaaaaaaaugcaucccccccccccccccccccccccccccccccaaaggcucuuuucagagccaccagaauu

SEQ ID NO: 2329 - RNA, 1402 nt, Artificial Sequence
  mRNA product Design c-5 comprising derived and/or modified sequence from YFV__NC_002031.1__SSIgE-NS1 (polyprotein: aa779-1130) (opt3)
gggagagcggcucggccauuuugucccagucaguccggaggcugcggcugcagaaguaccgccugcggaguaacugcaaagaagcuuaccauggacuggaccuggauccuguuccucguggccgcugcaacaagaguccacagcgaccaggguugcgcuauaaacuuuggcaagagagagcugaaauguggggauggaaucuucauuuuuagggacucagaugacugguugaauaaguacaguuauuaccccgaagauccugugaaauuagcaagcaucguaaaggccuccuucgaggaaggcaaaugcggucugaacucuguggacucgcuagagcacgaaauguggcggucacgcgcggaugagauuaaugcuaucuuugaggaaaacgaggucgacauaagcgugguugugcaagauccaaagaaugucuaucagcgagggacccauccguucagucguaucagagacggacuccaguacggcuggaagacauggggcaaaaaccugguguuuucccccgggaggaagaauggaucuuucauuaucgaugguaaaagccggaaggaauguccuuuuuccaaccgcguauggaacucauuccagauugaggaguuuggcacugggguuuucacgaccagaguguauauggacgccgucuuugaauacacaaucgauugcgacggaaguauacuuggcgcagccgugaaugguaaaaagagcgcucacgggucuccaacuuucuggaugggaucccaugaggugaauggcaccuggaugauucacacacuggaagcauuggacuauaaggagugugaauggccccucacccauacuaucggcacaucagucgaggagagcgaaauguucaugccuaggaguauugggggaccaguuucuucccacaaccacauccccgguuacaaagugcaaaccaauggcccuuggaugcagguaccacuggaggugaagcgggaagccugcccggggacgagcgucaucauugauggaaacugugacggccgcgguaaaucgacucgaucuaccacagauuccgggaaggugauacccgaguggugcuguagaucaugcacuaugccuccaguuaguuuucauggcagcgacggauguugguaccccauggaaaucaggccucggaaaacccacgagucccaucuggugcguucuugggucacagcuugaggacuagucccuguucccagagcccacuuuuuuuucuuuuuuugaaauaaaauagccugucuuucagaucuaaaaaaaaaaaaaaaaaaaaaaaaaaaaaaaaaaaaaaaaaaaaaaaaaaaaaaaaaaaaaaaaugcaucccccccccccccccccccccccccccccccaaaggcucuuuucagagccaccagaauu

SEQ ID NO: 2330 - RNA, 1552 nt, Artificial Sequence
  mRNA product Design c-5 comprising derived and/or modified sequence from YFV__NC_002031.1__eSS-NS1-Y (polyprotein: aa758-1177) (opt4)
gggagagcggcucggccauuuugucccagucaguccggaggcugcggcugcagaaguaccgccugcggaguaacugcaaagaagcuuaccaugagcaugagcaugauccuggugggcgugaucaugauguuccugagccugggcgugggcgccgaccagggcugcgccaucaacuucggcaagagagagcugaagugcggcgacggcaucuucaucuucagagacagcgacgacuggcugaacaaguacagcuacuaccccgaggaccccgugaagcuggccagcaucgugaaggccagcuucgaggagggcaagugcggccugaacagcguggacagccuggagcacgagauguggagaagcagagccgacgagaucaacgccaucuucgaggagaacgagguggacaucagcgugguggugcaggaccccaagaacguguaccagagaggcacccaccccuucagcagaaucagagacggccugcaguacggcuggaagaccuggggcaagaaccugguguucagccccggcagaaagaacggcagcuucaucaucgacggcaagagcagaaaggagugccccuucagcaacagaguguggaacagcuuccagaucgaggaguucggcaccggcguguucaccaccagaguguacauggacgccguguucgaguacaccaucgacugcgacggcagcauccugggcgccgccgugaacggcaagaagagcgcccacggcagccccaccuucuggaugggcagccacgaggugaacggcaccuggaugauccacacccuggaggcccuggacuacaaggagugcgaguggccccugacccacaccaucggcaccagcguggaggagagcgagauguucaugcccagaagcaucggcggccccgugagcagccacaaccacauccccggcuacaaggugcagaccaacggccccuggaugcaggugccccuggaggugaagagagaggccugccccggcaccagcgugaucaucgacggcaacugcgacggcagaggcaagagcaccagaagcaccaccgacagcggcaaggugauccccgaguggugcugcagaagcugcaccaugccccccgugagcuuccacggcagcgacggcugcugguaccccauggagaucagacccagaaagacccacgagagccaccuggugagaagcugggugaccgccggcgagauccacgccgugcccuucggccuggugagcaugaugaucgccauggagguggugcugagaaagagacagggccccaagcagaugcuggugggcggcguggugcugcugggcgccaugcuggugggccaggugaccugaggacuagucccuguucccagagcccacuuuuuuuucuuuuuuugaaauaaaauagccugucuuucagaucuaaaaaaaaaaaaaaaaaaaaaaaaaaaaaaaaaaaaaaaaaaaaaaaaaaaaaaaaaaaaaaaaugcaucccccccccccccccccccccccccccccccaaaggcucuuuucagagccaccagaauu

SEQ ID NO: 2331 - RNA, 1411 nt, Artificial Sequence
  mRNA product Design c-5 comprising derived and/or modified sequence from YFV__NC_002031.1__eSS-NS1 (polyprotein: aa758-1130) (opt4)
gggagagcggcucggccauuuugucccagucaguccggaggcugcggcugcagaaguaccgccugcggaguaacugcaaagaagcuuaccaugagcaugagcaugauccuggugggcgugaucaugauguuccugagccugggcgugggcgccgaccagggcugcgccaucaacuucggcaagagagagcugaagugcggcgacggcaucuucaucuucagagacagcgacgacuggcugaacaaguacagcuacuaccccgaggaccccgugaagcuggccagcaucgugaaggccagcuucgaggagggcaagugcggccugaacagcguggacagccuggagcacgagauguggagaagcagagccgacgagaucaacgccaucuucgaggagaacgagguggacaucagcgugguggugcaggaccccaagaacguguaccagagaggcacccaccccuucagcagaaucagagacggccugcaguacggcuggaagaccuggggcaagaaccugguguucagccccggcagaaagaacggcagcuucaucaucgacggcaagagcagaaaggagugccccuucagcaacagaguguggaacagcuuccagaucgaggaguucggcaccggcguguucaccaccagaguguacauggacgccguguucgaguacaccaucgacugcgacggcagcauccugggcgccgccgugaacggcaagaagagcgcccacggcagccccaccuucuggaugggcagccacgaggugaacggcaccuggaugauccacacccuggaggcccuggacuacaaggagugcgaguggccccugacccacaccaucggcaccagcguggaggagagcgagauguucaugcccagaagcaucggcggccccgugagcagccacaaccacauccccggcuacaaggugcagaccaacggccccuggaugcaggugccccuggaggugaagagagaggccugccccggcaccagcgugaucaucgacggcaacugcgacggcagaggcaagagcaccagaagcaccaccgacagcggcaaggugauccccgaguggugcugcagaagcugcaccaugccccccgugagcuuccacggcagcgacggcugcugguaccccauggagaucagacccagaaagacccacgagagccaccuggugagaagcugggugaccgccugaggacuagucccuguucccagagcccacuuuuuuuucuuuuuuugaaauaaaauagccugucuuucagaucuaaaaaaaaaaaaaaaaaaaaaaaaaaaaaaaaaaaaaaaaaaaaaaaaaaaaaaaaaaaaaaaaugcaucccccccccccccccccccccccccccccccaaaggcucuuuucagagccaccagaauu

SEQ ID NO: 2332 - RNA, 1402 nt, Artificial Sequence
  mRNA product Design c-5 comprising derived and/or modified sequence from YFV__NC_002031.1__SSIgE-NS1 (polyprotein: aa779-1130) (opt4)
gggagagcggcucggccauuuugucccagucaguccggaggcugcggcugcagaaguaccgccugcggaguaacugcaaagaagcuuaccauggacuggaccuggauccuguuccugguggccgccgccaccagagugcacagcgaccagggcugcgccaucaacuucggcaagagagagcugaagugcggcgacggcaucuucaucuucagagacagcgacgacuggcugaacaaguacagcuacuaccccgaggaccccgugaagcuggccagcaucgugaaggccagcuucgaggagggcaagugcggccugaacagcguggacagccuggagcacgagauguggagaagcagagccgacgagaucaacgccaucuucgaggagaacgagguggacaucagcgugguggugcaggaccccaagaacguguaccagagaggcacccaccccuucagcagaaucagagacggccugcaguacggcuggaagaccuggggcaagaaccugguguucagccccggcagaaagaacggcagcuucaucaucgacggcaagagcagaaaggagugccccuucagcaacagaguguggaacagcuuccagaucgaggaguucggcaccggcguguucaccaccagaguguacauggacgccguguucgaguacaccaucgacugcgacggcagcauccugggcgccgccgugaacggcaagaagagcgcccacggcagccccaccuucuggaugggcagccacgaggugaacggcaccuggaugauccacacccuggaggcccuggacuacaaggagugcgaguggccccugacccacaccaucggcaccagcguggaggagagcgagauguucaugcccagaagcaucggcggccccgugagcagccacaaccacauccccggcuacaaggugcagaccaacggccccuggaugcaggugccccuggaggugaagagagaggccugccccggcaccagcgugaucaucgacggcaacugcgacggcagaggcaagagcaccagaagcaccaccgacagcggcaaggugauccccgaguggugcugcagaagcugcaccaugccccccgugagcuuccacggcagcgacggcugcugguaccccauggagaucagacccagaaagacccacgagagccaccuggugagaagcugggugaccgccugaggacuagucccuguucccagagcccacuuuuuuuucuuuuuuugaaauaaaauagccugucuuucagaucuaaaaaaaaaaaaaaaaaaaaaaaaaaaaaaaaaaaaaaaaaaaaaaaaaaaaaaaaaaaaaaaaugcaucccccccccccccccccccccccccccccccaaaggcucuuuucagagccaccagaauu

SEQ ID NO: 2333 - RNA, 1552 nt, Artificial Sequence
  mRNA product Design c-5 comprising derived and/or modified sequence from YFV__NC_002031.1__eSS-NS1-Y (polyprotein: aa758-1177) (opt5)
gggagagcggcucggccauuuugucccagucaguccggaggcugcggcugcagaaguaccgccugcggaguaacugcaaagaagcuuaccaugagcauguccaugauccuggugggcgucauuaugauguuccucucucuggggguuggagccgaccagggcugcgcuaucaacuuugggaagagagagcuuaaauguggagauggcauuuucaucuuucgggacagcgaugacuggcugaauaaguacuccuauuaccccgaagauccugugaaacucgccucuauugugaaggcgagcuucgaggaagggaaaugcggacugaacuccgucgacucucuugagcacgaaauguggcgcagcagagcugaugagaucaaugccaucuuugaggaaaacgagguggacauuuccguugugguccaagauccgaagaauguguaucagcggggcacccaucccuucagccgcaucagagacggccugcaguacggguggaagacauggggcaaaaaccucguguuuucuccuggacggaagaauggguccuucauuaucgauggaaaaagccgcaaggaaugucccuuuucuaacagaguguggaacuccuuccagauugaggaguuuggcacgggggucuucaccacacggguguauauggacgccguguuugaauacaccaucgauugcgacggaagcauucugggcgcugccgucaauggcaaaaagucugcucacggguccccuacauucuggaugggaagccaugagguuaauggcaccuggaugauccacacacuggaagcccucgacuauaaggagugugaauggccccugacccauacgaucgggaccuccguggaggagucugaaauguucaugccucgcagcauuggaggcccgguguccagccacaaccacauccccggguacaaaguccaaacaaauggaccuuggaugcagguuccccuugagguuaagagagaagcgugcccuggcaccucugugauuaucgauggcaacugugacgggcggggaaaauccacacgcagcaccacggauucuggcaaggucauucccgaguggugcuguagaagcugcacaaugccgccuguguccuuucaugggucugacggauguugguaccccauggaaauccggccucgcaaaacccacgagagccaucugguuagauccugggugacagccggcgagauccacgcuguccccuucgggcucgugagcaugaugauugccauggaagucgugcugcggaagagacagggccccaaacagaugcuuguuggaggcgugguccugcucggggcuaugcuggugggacaaguuaccugaggacuagucccuguucccagagcccacuuuuuuuucuuuuuuugaaauaaaauagccugucuuucagaucuaaaaaaaaaaaaaaaaaaaaaaaaaaaaaaaaaaaaaaaaaaaaaaaaaaaaaaaaaaaaaaaaugcaucccccccccccccccccccccccccccccccaaaggcucuuuucagagccaccagaauu

SEQ ID NO: 2334 - RNA, 1411 nt, Artificial Sequence
  mRNA product Design c-5 comprising derived and/or modified sequence from YFV__NC_002031.1__eSS-NS1 (polyprotein: aa758-1130) (opt5)
gggagagcggcucggccauuuugucccagucaguccggaggcugcggcugcagaaguaccgccugcggaguaacugcaaagaagcuuaccaugagcauguccaugauccuggugggcgucauuaugauguuccucucucuggggguuggagccgaccagggcugcgcuaucaacuuugggaagagagagcuuaaauguggagauggcauuuucaucuuucgggacagcgaugacuggcugaauaaguacuccuauuaccccgaagauccugugaaacucgccucuauugugaaggcgagcuucgaggaagggaaaugcggacugaacuccgucgacucucuugagcacgaaauguggcgcagcagagcugaugagaucaaugccaucuuugaggaaaacgagguggacauuuccguugugguccaagauccgaagaauguguaucagcggggcacccaucccuucagccgcaucagagacggccugcaguacggguggaagacauggggcaaaaaccucguguuuucuccuggacggaagaauggguccuucauuaucgauggaaaaagccgcaaggaaugucccuuuucuaacagaguguggaacuccuuccagauugaggaguuuggcacgggggucuucaccacacggguguauauggacgccguguuugaauacaccaucgauugcgacggaagcauucugggcgcugccgucaauggcaaaaagucugcucacggguccccuacauucuggaugggaagccaugagguuaauggcaccuggaugauccacacacuggaagcccucgacuauaaggagugugaauggccccugacccauacgaucgggaccuccguggaggagucugaaauguucaugccucgcagcauuggaggcccgguguccagccacaaccacauccccggguacaaaguccaaacaaauggaccuuggaugcagguuccccuugagguuaagagagaagcgugcccuggcaccucugugauuaucgauggcaacugugacgggcggggaaaauccacacgcagcaccacggauucuggcaaggucauucccgaguggugcuguagaagcugcacaaugccgccuguguccuuucaugggucugacggauguugguaccccauggaaauccggccucgcaaaacccacgagagccaucugguuagauccugggugacagccugaggacuagucccuguucccagagcccacuuuuuuuucuuuuuuugaaauaaaauagccugucuuucagaucuaaaaaaaaaaaaaaaaaaaaaaaaaaaaaaaaaaaaaaaaaaaaaaaaaaaaaaaaaaaaaaaaugcaucccccccccccccccccccccccccccccccaaaggcucuuuucagagccaccagaauu

SEQ ID NO: 2335 - RNA, 1402 nt, Artificial Sequence
  mRNA product Design c-5 comprising derived and/or modified sequence from YFV__NC_002031.1__SSIgE-NS1 (polyprotein: aa779-1130) (opt5)
gggagagcggcucggccauuuugucccagucaguccggaggcugcggcugcagaaguaccgccugcggaguaacugcaaagaagcuuaccauggacuggaccuggauccuguuccucguggccgcugccacaagaguccacagcgaccagggcugcgcuaucaacuuugggaagagagagcuuaaauguggagauggcauuuucaucuuucgggacagcgaugacuggcugaauaaguacuccuauuaccccgaagauccugugaaacucgccucuauugugaaggcgagcuucgaggaagggaaaugcggacugaacuccgucgacucucuugagcacgaaauguggcgcagcagagcugaugagaucaaugccaucuuugaggaaaacgagguggacauuuccguugugguccaagauccgaagaauguguaucagcggggcacccaucccuucagccgcaucagagacggccugcaguacggguggaagacauggggcaaaaaccucguguuuucuccuggacggaagaauggguccuucauuaucgauggaaaaagccgcaaggaaugucccuuuucuaacagaguguggaacuccuuccagauugaggaguuuggcacgggggucuucaccacacggguguauauggacgccguguuugaauacaccaucgauugcgacggaagcauucugggcgcugccgucaauggcaaaaagucugcucacggguccccuacauucuggaugggaagccaugagguuaauggcaccuggaugauccacacacuggaagcccucgacuauaaggagugugaauggccccugacccauacgaucgggaccuccguggaggagucugaaauguucaugccucgcagcauuggaggcccgguguccagccacaaccacauccccggguacaaaguccaaacaaauggaccuuggaugcagguuccccuugagguuaagagagaagcgugcccuggcaccucugugauuaucgauggcaacugugacgggcggggaaaauccacacgcagcaccacggauucuggcaaggucauucccgaguggugcuguagaagcugcacaaugccgccuguguccuuucaugggucugacggauguugguaccccauggaaauccggccucgcaaaacccacgagagccaucugguuagauccugggugacagccugaggacuagucccuguucccagagcccacuuuuuuuucuuuuuuugaaauaaaauagccugucuuucagaucuaaaaaaaaaaaaaaaaaaaaaaaaaaaaaaaaaaaaaaaaaaaaaaaaaaaaaaaaaaaaaaaaugcaucccccccccccccccccccccccccccccccaaaggcucuuuucagagccaccagaauu

SEQ ID NO: 2336 - RNA, 1552 nt, Artificial Sequence
  mRNA product Design c-5 comprising derived and/or modified sequence from YFV__NC_002031.1__eSS-NS1-Y (polyprotein: aa758-1177) (opt6)
gggagagcggcucggccauuuugucccagucaguccggaggcugcggcugcagaaguaccgccugcggaguaacugcaaagaagcuuaccaugucaaugaguaugauauuaguagggguaauaaugauguuccuuagcuuaggaguaggagcagaucaaggaugugcaauaaauuuuggaaaaagagaacuaaaaugcggagacgguauauuuauauuuagagauagugaugauuggcuaaauaaauauaguuacuauccagaagauccaguuaaauuagccucaauaguaaaagcuagcuuugaagaaggaaaauguggacuaaauucaguagacagucuagaacacgaaauguggagaucaagggcagaugaaauaaaugcaaucuuugaagaaaaugaaguggauauaucagugguaguacaagauccaaaaaauguguaccaaagaggaacacauccauuuaguaggauaagagauggauuacaauauggauggaaaacauggggaaaaaauuuaguauuuaguccaggaagaaaaaauggaucauuuauaauagaugggaaaagccgaaaagaauguccauuuucaaacagaguauggaacucauuucaaauugaagaauuuggaacaggaguauuuacaacaagaguauauauggaugcaguauuugaauacaccauagauugugauggaaguauauuaggagcagcaguaaaugggaaaaaaagcgcucacggaaguccaacguuuuggaugggaucacacgagguaaauggcacguggaugauacauacuuuagaagcauuagauuacaaagaaugugaauggccauuaacucauacaauagguacaagcguagaagaaagugagauguuuaugccacguucaaucggggggccaguaucaagucauaaccauauaccaggauauaaaguacaaacgaauggaccuuggaugcaaguaccacuagaaguaaaacgagaagcaugcccaggaacgucaguaauaauagauggaaauugugauggcagggguaaaagcacaagaucaacaacagauucaggaaaaguaauaccugaaugguguuguagaaguuguacaaugccaccaguaucauuccauggaagugauggaugcugguauccaauggaaauuagaccaagaaaaacucaugaaagucauuuaguaagaucuuggguaacugcaggagaaauacaugcaguaccauuugguuuaguaaguaugaugauagcaauggaaguaguucuaagaaaaaggcaagggccuaaacaaaugcuagugggaggaguaguauugcuaggugcaauguuaguaggccaaguaaccugaggacuagucccuguucccagagcccacuuuuuuuucuuuuuuugaaauaaaauagccugucuuucagaucuaaaaaaaaaaaaaaaaaaaaaaaaaaaaaaaaaaaaaaaaaaaaaaaaaaaaaaaaaaaaaaaaugcaucccccccccccccccccccccccccccccccaaaggcucuuuucagagccaccagaauu

SEQ ID NO: 2337 - RNA, 1411 nt, Artificial Sequence
  mRNA product Design c-5 comprising derived and/or modified sequence from YFV__NC_002031.1__eSS-NS1 (polyprotein: aa758-1130) (opt6)
gggagagcggcucggccauuuugucccagucaguccggaggcugcggcugcagaaguaccgccugcggaguaacugcaaagaagcuuaccaugucaaugaguaugauauuaguagggguaauaaugauguuccuuagcuuaggaguaggagcagaucaaggaugugcaauaaauuuuggaaaaagagaacuaaaaugcggagacgguauauuuauauuuagagauagugaugauuggcuaaauaaauauaguuacuauccagaagauccaguuaaauuagccucaauaguaaaagcuagcuuugaagaaggaaaauguggacuaaauucaguagacagucuagaacacgaaauguggagaucaagggcagaugaaauaaaugcaaucuuugaagaaaaugaaguggauauaucagugguaguacaagauccaaaaaauguguaccaaagaggaacacauccauuuaguaggauaagagauggauuacaauauggauggaaaacauggggaaaaaauuuaguauuuaguccaggaagaaaaaauggaucauuuauaauagaugggaaaagccgaaaagaauguccauuuucaaacagaguauggaacucauuucaaauugaagaauuuggaacaggaguauuuacaacaagaguauauauggaugcaguauuugaauacaccauagauugugauggaaguauauuaggagcagcaguaaaugggaaaaaaagcgcucacggaaguccaacguuuuggaugggaucacacgagguaaauggcacguggaugauacauacuuuagaagcauuagauuacaaagaaugugaauggccauuaacucauacaauagguacaagcguagaagaaagugagauguuuaugccacguucaaucggggggccaguaucaagucauaaccauauaccaggauauaaaguacaaacgaauggaccuuggaugcaaguaccacuagaaguaaaacgagaagcaugcccaggaacgucaguaauaauagauggaaauugugauggcagggguaaaagcacaagaucaacaacagauucaggaaaaguaauaccugaaugguguuguagaaguuguacaaugccaccaguaucauuccauggaagugauggaugcugguauccaauggaaauuagaccaagaaaaacucaugaaagucauuuaguaagaucuuggguaacugcaugaggacuagucccuguucccagagcccacuuuuuuuucuuuuuuugaaauaaaauagccugucuuucagaucuaaaaaaaaaaaaaaaaaaaaaaaaaaaaaaaaaaaaaaaaaaaaaaaaaaaaaaaaaaaaaaaaugcaucccccccccccccccccccccccccccccccaaaggcucuuuucagagccaccagaauu

SEQ ID NO: 2338 - RNA, 1402 nt, Artificial Sequence
  mRNA product Design c-5 comprising derived and/or modified sequence from YFV__NC_002031.1__SSIgE-NS1 (polyprotein: aa779-1130) (opt6)
gggagagcggcucggccauuuugucccagucaguccggaggcugcggcugcagaaguaccgccugcggaguaacugcaaagaagcuuaccauggacuggacauggauauuauuuuuaguagcagcagcaacaagaguacauucagaucaaggaugugcaauaaauuuuggaaaaagagaacuaaaaugcggagacgguauauuuauauuuagagauagugaugauuggcuaaauaaauauaguuacuauccagaagauccaguuaaauuagccucaauaguaaaagcuagcuuugaagaaggaaaauguggacuaaauucaguagacagucuagaacacgaaauguggagaucaagggcagaugaaauaaaugcaaucuuugaagaaaaugaaguggauauaucagugguaguacaagauccaaaaaauguguaccaaagaggaacacauccauuuaguaggauaagagauggauuacaauauggauggaaaacauggggaaaaaauuuaguauuuaguccaggaagaaaaaauggaucauuuauaauagaugggaaaagccgaaaagaauguccauuuucaaacagaguauggaacucauuucaaauugaagaauuuggaacaggaguauuuacaacaagaguauauauggaugcaguauuugaauacaccauagauugugauggaaguauauuaggagcagcaguaaaugggaaaaaaagcgcucacggaaguccaacguuuuggaugggaucacacgagguaaauggcacguggaugauacauacuuuagaagcauuagauuacaaagaaugugaauggccauuaacucauacaauagguacaagcguagaagaaagugagauguuuaugccacguucaaucggggggccaguaucaagucauaaccauauaccaggauauaaaguacaaacgaauggaccuuggaugcaaguaccacuagaaguaaaacgagaagcaugcccaggaacgucaguaauaauagauggaaauugugauggcagggguaaaagcacaagaucaacaacagauucaggaaaaguaauaccugaaugguguuguagaaguuguacaaugccaccaguaucauuccauggaagugauggaugcugguauccaauggaaauuagaccaagaaaaacucaugaaagucauuuaguaagaucuuggguaacugcaugaggacuagucccuguucccagagcccacuuuuuuuucuuuuuuugaaauaaaauagccugucuuucagaucuaaaaaaaaaaaaaaaaaaaaaaaaaaaaaaaaaaaaaaaaaaaaaaaaaaaaaaaaaaaaaaaaugcaucccccccccccccccccccccccccccccccaaaggcucuuuucagagccaccagaauu

SEQ ID NO: 2339 - RNA, 1552 nt, Artificial Sequence
  mRNA product Design c-5 comprising derived and/or modified sequence from YFV__NC_002031.1__eSS-NS1-Y (polyprotein: aa758-1177) (opt11)
gggagagcggcucggccauuuugucccagucaguccggaggcugcggcugcagaaguaccgccugcggaguaacugcaaagaagcuuaccaugagcaugagcaugaucuugguaggggucauaaugauguucuugagccuagggguaggcgcagaccagggaugcgcgauaaacuucggcaaacgcgaacucaaaugcggggacggaaucuucaucuuucgcgacagugacgacuggcuaaacaaguacaguuacuacccggaagaccccguaaaacuagccucaauaguaaaagcgagcuucgaagaaggaaagugcgggcuaaacagcguggacucccuagagcacgagauguggaggucgagagcggacgagaucaacgccauauucgaagaaaaugaaguagacauaagcguagucguacaagaucccaaaaacguguaccagcgcggaacccaccccuucagcaggaucagagacgggcuacaauacggauggaagacauggggcaaaaaccuggucuucagcccgggcaggaaaaacggaucguucaucaucgauggcaaaagccgaaaggagugcccguucucaaacaggguauggaacucguuccagaucgaagaguucggcacaggcgucuucacgacaagagucuacauggacgcaguguucgaauacacaaucgacugcgacggcuccauacugggcgcagccgugaacgggaaaaagagcgcacacggaagcccgaccuuuuggauggguucgcacgaggugaacggaacauggaugauacacaccuuagaagcacucgauuacaaagaaugcgaauggcccuuaacccacaccaucgguacguccguagaagaaagcgaaauguucaugccgcgcucaaucggcggcccagucucgagccacaaccacaucccgggcuauaaaguacaaacaaacgggccauggaugcagguaccccucgaggucaagcgcgaagccugccccggaaccucggucaucaucgacggcaacugcgacggcaggggaaaaagcacgcgcucaaccacggacucgggaaagguaauaccagaguggugcugcaggagcugcaccaugccaccgguaucguuccacggcucagacggaugcugguacccgauggaaaucagacccagaaaaacgcacgagagccaccucguacgcucauggguaaccgcaggcgagauccacgccgugccauuuggacuggucucaaugaugauagcgauggaggucgugcucaggaagaggcaagggcccaagcaaaugcucguaggaggaguaguacuccugggcgcaaugcuggucggacaggugaccugaggacuagucccuguucccagagcccacuuuuuuuucuuuuuuugaaauaaaauagccugucuuucagaucuaaaaaaaaaaaaaaaaaaaaaaaaaaaaaaaaaaaaaaaaaaaaaaaaaaaaaaaaaaaaaaaaugcaucccccccccccccccccccccccccccccccaaaggcucuuuucagagccaccagaauu

SEQ ID NO: 2340 - RNA, 1411 nt, Artificial Sequence
  mRNA product Design c-5 comprising derived and/or modified sequence from YFV__NC_002031.1__eSS-NS1 (polyprotein: aa758-1130) (opt11)
gggagagcggcucggccauuuugucccagucaguccggaggcugcggcugcagaaguaccgccugcggaguaacugcaaagaagcuuaccaugagcaugagcaugaucuugguaggggucauaaugauguucuugagccuagggguaggcgcagaccagggaugcgcgauaaacuucggcaaacgcgaacucaaaugcggggacggaaucuucaucuuucgcgacagugacgacuggcuaaacaaguacaguuacuacccggaagaccccguaaaacuagccucaauaguaaaagcgagcuucgaagaaggaaagugcgggcuaaacagcguggacucccuagagcacgagauguggaggucgagagcggacgagaucaacgccauauucgaagaaaaugaaguagacauaagcguagucguacaagaucccaaaaacguguaccagcgcggaacccaccccuucagcaggaucagagacgggcuacaauacggauggaagacauggggcaaaaaccuggucuucagcccgggcaggaaaaacggaucguucaucaucgauggcaaaagccgaaaggagugcccguucucaaacaggguauggaacucguuccagaucgaagaguucggcacaggcgucuucacgacaagagucuacauggacgcaguguucgaauacacaaucgacugcgacggcuccauacugggcgcagccgugaacgggaaaaagagcgcacacggaagcccgaccuuuuggauggguucgcacgaggugaacggaacauggaugauacacaccuuagaagcacucgauuacaaagaaugcgaauggcccuuaacccacaccaucgguacguccguagaagaaagcgaaauguucaugccgcgcucaaucggcggcccagucucgagccacaaccacaucccgggcuauaaaguacaaacaaacgggccauggaugcagguaccccucgaggucaagcgcgaagccugccccggaaccucggucaucaucgacggcaacugcgacggcaggggaaaaagcacgcgcucaaccacggacucgggaaagguaauaccagaguggugcugcaggagcugcaccaugccaccgguaucguuccacggcucagacggaugcugguacccgauggaaaucagacccagaaaaacgcacgagagccaccucguacgcucauggguaaccgcaugaggacuagucccuguucccagagcccacuuuuuuuucuuuuuuugaaauaaaauagccugucuuucagaucuaaaaaaaaaaaaaaaaaaaaaaaaaaaaaaaaaaaaaaaaaaaaaaaaaaaaaaaaaaaaaaaaugcaucccccccccccccccccccccccccccccccaaaggcucuuuucagagccaccagaauu

SEQ ID NO: 2341 - RNA, 1402 nt, Artificial Sequence
  mRNA product Design c-5 comprising derived and/or modified sequence from YFV__NC_002031.1__SSIgE-NS1 (polyprotein: aa779-1130) (opt11)
gggagagcggcucggccauuuugucccagucaguccggaggcugcggcugcagaaguaccgccugcggaguaacugcaaagaagcuuaccauggauuggacguggauacucuuucucguggccgcggccacgcgcgugcacucggaccagggaugcgcgauaaacuucggcaaacgcgaacucaaaugcggggacggaaucuucaucuuucgcgacagugacgacuggcuaaacaaguacaguuacuacccggaagaccccguaaaacuagccucaauaguaaaagcgagcuucgaagaaggaaagugcgggcuaaacagcguggacucccuagagcacgagauguggaggucgagagcggacgagaucaacgccauauucgaagaaaaugaaguagacauaagcguagucguacaagaucccaaaaacguguaccagcgcggaacccaccccuucagcaggaucagagacgggcuacaauacggauggaagacauggggcaaaaaccuggucuucagcccgggcaggaaaaacggaucguucaucaucgauggcaaaagccgaaaggagugcccguucucaaacaggguauggaacucguuccagaucgaagaguucggcacaggcgucuucacgacaagagucuacauggacgcaguguucgaauacacaaucgacugcgacggcuccauacugggcgcagccgugaacgggaaaaagagcgcacacggaagcccgaccuuuuggauggguucgcacgaggugaacggaacauggaugauacacaccuuagaagcacucgauuacaaagaaugcgaauggcccuuaacccacaccaucgguacguccguagaagaaagcgaaauguucaugccgcgcucaaucggcggcccagucucgagccacaaccacaucccgggcuauaaaguacaaacaaacgggccauggaugcagguaccccucgaggucaagcgcgaagccugccccggaaccucggucaucaucgacggcaacugcgacggcaggggaaaaagcacgcgcucaaccacggacucgggaaagguaauaccagaguggugcugcaggagcugcaccaugccaccgguaucguuccacggcucagacggaugcugguacccgauggaaaucagacccagaaaaacgcacgagagccaccucguacgcucauggguaaccgcaugaggacuagucccuguucccagagcccacuuuuuuuucuuuuuuugaaauaaaauagccugucuuucagaucuaaaaaaaaaaaaaaaaaaaaaaaaaaaaaaaaaaaaaaaaaaaaaaaaaaaaaaaaaaaaaaaaugcaucccccccccccccccccccccccccccccccaaaggcucuuuucagagccaccagaauu

SEQ ID NO: 2342 - RNA, 1561 nt, Artificial Sequence
  mRNA product Design d-1 comprising derived and/or modified sequence from YFV__NC_002031.1__eSS-NS1-Y (polyprotein: aa758-1177) (wt)
gggagacccgugacccggaaguuguacggcuacgcgacuuucccucccacaaacccucgcgcccuuccuuuccuacuugggcccggcagaaagcuuaccauguccaugagcaugaucuugguaggagugaucaugauguuuuugucucuaggaguuggggcggaucaaggaugcgccaucaacuuuggcaagagagagcucaagugcggagaugguaucuucauauuuagagacucugaugacuggcugaacaaguacucauacuauccagaagauccugugaagcuugcaucaauagugaaagccucuuuugaagaagggaaguguggccuaaauucaguugacucccuugagcaugagauguggagaagcagggcagaugagaucaaugccauuuuugaggaaaacgagguggacauuucuguugucgugcaggauccaaagaauguuuaccagagaggaacucauccauuuuccagaauucgggauggucugcaguaugguuggaagacuugggguaagaaccuuguguucuccccagggaggaagaauggaagcuucaucauagauggaaaguccaggaaagaaugcccguuuucaaaccgggucuggaauucuuuccagauagaggaguuugggacgggaguguucaccacacgcguguacauggacgcagucuuugaauacaccauagacugcgauggaucuaucuugggugcagcggugaacggaaaaaagagugcccauggcucuccaacauuuuggaugggaagucaugaaguaaaugggacauggaugauccacaccuuggaggcauuagauuacaaggagugugaguggccacugacacauacgauuggaacaucaguugaagagagugaaauguucaugccgagaucaaucggaggcccaguuagcucucacaaucauaucccuggauacaagguucagacgaacggaccuuggaugcagguaccacuagaagugaagagagaagcuugcccagggacuagcgugaucauugauggcaacugugauggacggggaaaaucaaccagauccaccacggauagcgggaaaguuauuccugaaugguguugccgcuccugcacaaugccgccugugagcuuccaugguagugauggguguugguaucccauggaaauuaggccaaggaaaacgcaugaaagccaucuggugcgcuccuggguuacagcuggagaaauacaugcugucccuuuugguuuggugagcaugaugauagcaauggaagugguccuaaggaaaagacagggaccaaagcaaauguugguuggaggaguagugcucuugggagcaaugcuggucgggcaaguaacuugaggacuagucccuguucccagagcccacuuuuuuuucuuuuuuugaaauaaaauagccugucuuucagaucuaaaaaaaaaaaaaaaaaaaaaaaaaaaaaaaaaaaaaaaaaaaaaaaaaaaaaaaaaaaaaaaaugcaucccccccccccccccccccccccccccccccaaaggcucuuuucagagccaccagaauu

SEQ ID NO: 2343 - RNA, 1420 nt, Artificial Sequence
  mRNA product Design d-1 comprising derived and/or modified sequence from YFV__NC_002031.1__eSS-NS1 (polyprotein: aa758-1130) (wt)
gggagacccgugacccggaaguuguacggcuacgcgacuuucccucccacaaacccucgcgcccuuccuuuccuacuugggcccggcagaaagcuuaccauguccaugagcaugaucuugguaggagugaucaugauguuuuugucucuaggaguuggggcggaucaaggaugcgccaucaacuuuggcaagagagagcucaagugcggagaugguaucuucauauuuagagacucugaugacuggcugaacaaguacucauacuauccagaagauccugugaagcuugcaucaauagugaaagccucuuuugaagaagggaaguguggccuaaauucaguugacucccuugagcaugagauguggagaagcagggcagaugagaucaaugccauuuuugaggaaaacgagguggacauuucuguugucgugcaggauccaaagaauguuuaccagagaggaacucauccauuuuccagaauucgggauggucugcaguaugguuggaagacuugggguaagaaccuuguguucuccccagggaggaagaauggaagcuucaucauagauggaaaguccaggaaagaaugcccguuuucaaaccgggucuggaauucuuuccagauagaggaguuugggacgggaguguucaccacacgcguguacauggacgcagucuuugaauacaccauagacugcgauggaucuaucuugggugcagcggugaacggaaaaaagagugcccauggcucuccaacauuuuggaugggaagucaugaaguaaaugggacauggaugauccacaccuuggaggcauuagauuacaaggagugugaguggccacugacacauacgauuggaacaucaguugaagagagugaaauguucaugccgagaucaaucggaggcccaguuagcucucacaaucauaucccuggauacaagguucagacgaacggaccuuggaugcagguaccacuagaagugaagagagaagcuugcccagggacuagcgugaucauugauggcaacugugauggacggggaaaaucaaccagauccaccacggauagcgggaaaguuauuccugaaugguguugccgcuccugcacaaugccgccugugagcuuccaugguagugauggguguugguaucccauggaaauuaggccaaggaaaacgcaugaaagccaucuggugcgcuccuggguuacagcuugaggacuagucccuguucccagagcccacuuuuuuuucuuuuuuugaaauaaaauagccugucuuucagaucuaaaaaaaaaaaaaaaaaaaaaaaaaaaaaaaaaaaaaaaaaaaaaaaaaaaaaaaaaaaaaaaaugcaucccccccccccccccccccccccccccccccaaaggcucuuuucagagccaccagaauu

SEQ ID NO: 2344 - RNA, 1411 nt, Artificial Sequence
  mRNA product Design d-1 comprising derived and/or modified sequence from YFV__NC_002031.1__SSIgE-NS1 (polyprotein: aa779-1130) (wt)
gggagacccgugacccggaaguuguacggcuacgcgacuuucccucccacaaacccucgcgcccuuccuuuccuacuugggcccggcagaaagcuuaccauggacuggaccuggauccuguuccucguggccgccgcgacccgcguccacagcgaucaaggaugcgccaucaacuuuggcaagagagagcucaagugcggagaugguaucuucauauuuagagacucugaugacuggcugaacaaguacucauacuauccagaagauccugugaagcuugcaucaauagugaaagccucuuuugaagaagggaaguguggccuaaauucaguugacucccuugagcaugagauguggagaagcagggcagaugagaucaaugccauuuuugaggaaaacgagguggacauuucuguugucgugcaggauccaaagaauguuuaccagagaggaacucauccauuuuccagaauucgggauggucugcaguaugguuggaagacuugggguaagaaccuuguguucuccccagggaggaagaauggaagcuucaucauagauggaaaguccaggaaagaaugcccguuuucaaaccgggucuggaauucuuuccagauagaggaguuugggacgggaguguucaccacacgcguguacauggacgcagucuuugaauacaccauagacugcgauggaucuaucuugggugcagcggugaacggaaaaaagagugcccauggcucuccaacauuuuggaugggaagucaugaaguaaaugggacauggaugauccacaccuuggaggcauuagauuacaaggagugugaguggccacugacacauacgauuggaacaucaguugaagagagugaaauguucaugccgagaucaaucggaggcccaguuagcucucacaaucauaucccuggauacaagguucagacgaacggaccuuggaugcagguaccacuagaagugaagagagaagcuugcccagggacuagcgugaucauugauggcaacugugauggacggggaaaaucaaccagauccaccacggauagcgggaaaguuauuccugaaugguguugccgcuccugcacaaugccgccugugagcuuccaugguagugauggguguugguaucccauggaaauuaggccaaggaaaacgcaugaaagccaucuggugcgcuccuggguuacagcuugaggacuagucccuguucccagagcccacuuuuuuuucuuuuuuugaaauaaaauagccugucuuucagaucuaaaaaaaaaaaaaaaaaaaaaaaaaaaaaaaaaaaaaaaaaaaaaaaaaaaaaaaaaaaaaaaaugcaucccccccccccccccccccccccccccccccaaaggcucuuuucagagccaccagaauu

SEQ ID NO: 2345 - RNA, 1561 nt, Artificial Sequence
  mRNA product Design d-1 comprising derived and/or modified sequence from YFV__NC_002031.1__eSS-NS1-Y (polyprotein: aa758-1177) (opt1)
gggagacccgugacccggaaguuguacggcuacgcgacuuucccucccacaaacccucgcgcccuuccuuuccuacuugggcccggcagaaagcuuaccaugagcauguccaugauccuggugggcgucaucaugauguuccucagccugggggugggcgccgaccaggggugcgccaucaacuucggcaagcgcgagcugaagugcggggacggcaucuucaucuuccgggacuccgacgacuggcucaacaaguacagcuacuaccccgaggacccggugaagcuggcguccaucgucaaggccagcuucgaggagggcaagugcgggcugaacuccguggacagccucgagcacgagauguggcgcucccgggccgacgagaucaacgccaucuucgaggagaacgagguggacaucagcgucguggugcaggaccccaagaacgucuaccagcgcggcacccaccccuucucccggauccgcgacgggcugcaguacggcuggaagaccugggggaagaaccugguguucagccccggccggaagaacggcuccuucaucaucgacggcaagagccgcaaggagugcccguucuccaaccggguguggaacagcuuccagaucgaggaguucgggacgggggucuucaccacccgcguguacauggacgccguguucgaguacaccaucgacugcgacggcuccauccucggcgcggccgucaacgggaagaaguccgcccacggcagccccacguucuggauggggagccacgaggugaacggcaccuggaugauccacacccuggaggcccuggacuacaaggagugcgaguggccccucacccacacgaucgggaccagcguggaggaguccgagauguucaugccccggagcaucggcggcccggucuccagccacaaccacauccccggguacaaggugcagaccaacggccccuggaugcaggucccccuggaggugaagcgcgaggcgugcccggggaccuccgugaucaucgacggcaacugcgacgggcggggcaagagcacgcgcuccaccaccgacagcggcaaggugauccccgaguggugcugccgguccugcaccaugccgcccgucagcuuccacggguccgacggcugcugguaccccauggagauccgcccccggaagacgcacgagagccaccuggugcgcuccugggucaccgccggggagauccacgccgugcccuucggccucgugagcaugaugaucgccauggaggucgugcugcggaagcgccaggggcccaagcagaugcuggugggcggcgucgugcuccugggggccaugcuggugggccaggucaccugaggacuagucccuguucccagagcccacuuuuuuuucuuuuuuugaaauaaaauagccugucuuucagaucuaaaaaaaaaaaaaaaaaaaaaaaaaaaaaaaaaaaaaaaaaaaaaaaaaaaaaaaaaaaaaaaaugcaucccccccccccccccccccccccccccccccaaaggcucuuuucagagccaccagaauu

SEQ ID NO: 2346 - RNA, 1420 nt, Artificial Sequence
  mRNA product Design d-1 comprising derived and/or modified sequence from YFV__NC_002031.1__eSS-NS1 (polyprotein: aa758-1130) (opt1)
gggagacccgugacccggaaguuguacggcuacgcgacuuucccucccacaaacccucgcgcccuuccuuuccuacuugggcccggcagaaagcuuaccaugagcauguccaugauccuggugggcgucaucaugauguuccucagccugggggugggcgccgaccaggggugcgccaucaacuucggcaagcgcgagcugaagugcggggacggcaucuucaucuuccgggacuccgacgacuggcucaacaaguacagcuacuaccccgaggacccggugaagcuggcguccaucgucaaggccagcuucgaggagggcaagugcgggcugaacuccguggacagccucgagcacgagauguggcgcucccgggccgacgagaucaacgccaucuucgaggagaacgagguggacaucagcgucguggugcaggaccccaagaacgucuaccagcgcggcacccaccccuucucccggauccgcgacgggcugcaguacggcuggaagaccugggggaagaaccugguguucagccccggccggaagaacggcuccuucaucaucgacggcaagagccgcaaggagugcccguucuccaaccggguguggaacagcuuccagaucgaggaguucgggacgggggucuucaccacccgcguguacauggacgccguguucgaguacaccaucgacugcgacggcuccauccucggcgcggccgucaacgggaagaaguccgcccacggcagccccacguucuggauggggagccacgaggugaacggcaccuggaugauccacacccuggaggcccuggacuacaaggagugcgaguggccccucacccacacgaucgggaccagcguggaggaguccgagauguucaugccccggagcaucggcggcccggucuccagccacaaccacauccccggguacaaggugcagaccaacggccccuggaugcaggucccccuggaggugaagcgcgaggcgugcccggggaccuccgugaucaucgacggcaacugcgacgggcggggcaagagcacgcgcuccaccaccgacagcggcaaggugauccccgaguggugcugccgguccugcaccaugccgcccgucagcuuccacggguccgacggcugcugguaccccauggagauccgcccccggaagacgcacgagagccaccuggugcgcuccugggucaccgccugaggacuagucccuguucccagagcccacuuuuuuuucuuuuuuugaaauaaaauagccugucuuucagaucuaaaaaaaaaaaaaaaaaaaaaaaaaaaaaaaaaaaaaaaaaaaaaaaaaaaaaaaaaaaaaaaaugcaucccccccccccccccccccccccccccccccaaaggcucuuuucagagccaccagaauu

SEQ ID NO: 2347 - RNA, 1411 nt, Artificial Sequence
  mRNA product Design d-1 comprising derived and/or modified sequence from YFV__NC_002031.1__SSIgE-NS1 (polyprotein: aa779-1130) (opt1)
gggagacccgugacccggaaguuguacggcuacgcgacuuucccucccacaaacccucgcgcccuuccuuuccuacuugggcccggcagaaagcuuaccauggacuggaccuggauccuguuccucguggccgccgcgacccgcguccacagcgaccaggggugcgccaucaacuucggcaagcgcgagcugaagugcggggacggcaucuucaucuuccgggacuccgacgacuggcucaacaaguacagcuacuaccccgaggacccggugaagcuggcguccaucgucaaggccagcuucgaggagggcaagugcgggcugaacuccguggacagccucgagcacgagauguggcgcucccgggccgacgagaucaacgccaucuucgaggagaacgagguggacaucagcgucguggugcaggaccccaagaacgucuaccagcgcggcacccaccccuucucccggauccgcgacgggcugcaguacggcuggaagaccugggggaagaaccugguguucagccccggccggaagaacggcuccuucaucaucgacggcaagagccgcaaggagugcccguucuccaaccggguguggaacagcuuccagaucgaggaguucgggacgggggucuucaccacccgcguguacauggacgccguguucgaguacaccaucgacugcgacggcuccauccucggcgcggccgucaacgggaagaaguccgcccacggcagccccacguucuggauggggagccacgaggugaacggcaccuggaugauccacacccuggaggcccuggacuacaaggagugcgaguggccccucacccacacgaucgggaccagcguggaggaguccgagauguucaugccccggagcaucggcggcccggucuccagccacaaccacauccccggguacaaggugcagaccaacggccccuggaugcaggucccccuggaggugaagcgcgaggcgugcccggggaccuccgugaucaucgacggcaacugcgacgggcggggcaagagcacgcgcuccaccaccgacagcggcaaggugauccccgaguggugcugccgguccugcaccaugccgcccgucagcuuccacggguccgacggcugcugguaccccauggagauccgcccccggaagacgcacgagagccaccuggugcgcuccugggucaccgccugaggacuagucccuguucccagagcccacuuuuuuuucuuuuuuugaaauaaaauagccugucuuucagaucuaaaaaaaaaaaaaaaaaaaaaaaaaaaaaaaaaaaaaaaaaaaaaaaaaaaaaaaaaaaaaaaaugcaucccccccccccccccccccccccccccccccaaaggcucuuuucagagccaccagaauu

SEQ ID NO: 2348 - RNA, 1561 nt, Artificial Sequence
  mRNA product Design d-1 comprising derived and/or modified sequence from YFV__NC_002031.1__eSS-NS1-Y (polyprotein: aa758-1177) (opt2)
gggagacccgugacccggaaguuguacggcuacgcgacuuucccucccacaaacccucgcgcccuuccuuuccuacuugggcccggcagaaagcuuaccauguccauguccaugauccucgucggcgucaucaugauguuccucucccucggcgucggcgccgaccagggcugcgccaucaacuucggcaagcgcgagcucaagugcggcgacggcaucuucaucuuccgcgacuccgacgacuggcucaacaaguacuccuacuaccccgaggaccccgucaagcucgccuccaucgucaaggccuccuucgaggagggcaagugcggccucaacuccgucgacucccucgagcacgagauguggcgcucccgcgccgacgagaucaacgccaucuucgaggagaacgaggucgacaucuccgucgucguccaggaccccaagaacgucuaccagcgcggcacccaccccuucucccgcauccgcgacggccuccaguacggcuggaagaccuggggcaagaaccucgucuucucccccggccgcaagaacggcuccuucaucaucgacggcaagucccgcaaggagugccccuucuccaaccgcgucuggaacuccuuccagaucgaggaguucggcaccggcgucuucaccacccgcgucuacauggacgccgucuucgaguacaccaucgacugcgacggcuccauccucggcgccgccgucaacggcaagaaguccgcccacggcucccccaccuucuggaugggcucccacgaggucaacggcaccuggaugauccacacccucgaggcccucgacuacaaggagugcgaguggccccucacccacaccaucggcaccuccgucgaggaguccgagauguucaugccccgcuccaucggcggccccgucuccucccacaaccacauccccggcuacaagguccagaccaacggccccuggaugcaggucccccucgaggucaagcgcgaggccugccccggcaccuccgucaucaucgacggcaacugcgacggccgcggcaaguccacccgcuccaccaccgacuccggcaaggucauccccgaguggugcugccgcuccugcaccaugccccccgucuccuuccacggcuccgacggcugcugguaccccauggagauccgcccccgcaagacccacgagucccaccucguccgcuccugggucaccgccggcgagauccacgccguccccuucggccucgucuccaugaugaucgccauggaggucguccuccgcaagcgccagggccccaagcagaugcucgucggcggcgucguccuccucggcgccaugcucgucggccaggucaccugaggacuagucccuguucccagagcccacuuuuuuuucuuuuuuugaaauaaaauagccugucuuucagaucuaaaaaaaaaaaaaaaaaaaaaaaaaaaaaaaaaaaaaaaaaaaaaaaaaaaaaaaaaaaaaaaaugcaucccccccccccccccccccccccccccccccaaaggcucuuuucagagccaccagaauu

SEQ ID NO: 2349 - RNA, 1420 nt, Artificial Sequence
  mRNA product Design d-1 comprising derived and/or modified sequence from YFV__NC_002031.1__eSS-NS1 (polyprotein: aa758-1130) (opt2)
gggagacccgugacccggaaguuguacggcuacgcgacuuucccucccacaaacccucgcgcccuuccuuuccuacuugggcccggcagaaagcuuaccauguccauguccaugauccucgucggcgucaucaugauguuccucucccucggcgucggcgccgaccagggcugcgccaucaacuucggcaagcgcgagcucaagugcggcgacggcaucuucaucuuccgcgacuccgacgacuggcucaacaaguacuccuacuaccccgaggaccccgucaagcucgccuccaucgucaaggccuccuucgaggagggcaagugcggccucaacuccgucgacucccucgagcacgagauguggcgcucccgcgccgacgagaucaacgccaucuucgaggagaacgaggucgacaucuccgucgucguccaggaccccaagaacgucuaccagcgcggcacccaccccuucucccgcauccgcgacggccuccaguacggcuggaagaccuggggcaagaaccucgucuucucccccggccgcaagaacggcuccuucaucaucgacggcaagucccgcaaggagugccccuucuccaaccgcgucuggaacuccuuccagaucgaggaguucggcaccggcgucuucaccacccgcgucuacauggacgccgucuucgaguacaccaucgacugcgacggcuccauccucggcgccgccgucaacggcaagaaguccgcccacggcucccccaccuucuggaugggcucccacgaggucaacggcaccuggaugauccacacccucgaggcccucgacuacaaggagugcgaguggccccucacccacaccaucggcaccuccgucgaggaguccgagauguucaugccccgcuccaucggcggccccgucuccucccacaaccacauccccggcuacaagguccagaccaacggccccuggaugcaggucccccucgaggucaagcgcgaggccugccccggcaccuccgucaucaucgacggcaacugcgacggccgcggcaaguccacccgcuccaccaccgacuccggcaaggucauccccgaguggugcugccgcuccugcaccaugccccccgucuccuuccacggcuccgacggcugcugguaccccauggagauccgcccccgcaagacccacgagucccaccucguccgcuccugggucaccgccugaggacuagucccuguucccagagcccacuuuuuuuucuuuuuuugaaauaaaauagccugucuuucagaucuaaaaaaaaaaaaaaaaaaaaaaaaaaaaaaaaaaaaaaaaaaaaaaaaaaaaaaaaaaaaaaaaugcaucccccccccccccccccccccccccccccccaaaggcucuuuucagagccaccagaauu

SEQ ID NO: 2350 - RNA, 1411 nt, Artificial Sequence
  mRNA product Design d-1 comprising derived and/or modified sequence from YFV__NC_002031.1__SSIgE-NS1 (polyprotein: aa779-1130) (opt2)
gggagacccgugacccggaaguuguacggcuacgcgacuuucccucccacaaacccucgcgcccuuccuuuccuacuugggcccggcagaaagcuuaccauggacuggaccuggauccucuuccucgucgccgccgccacccgcguccacuccgaccagggcugcgccaucaacuucggcaagcgcgagcucaagugcggcgacggcaucuucaucuuccgcgacuccgacgacuggcucaacaaguacuccuacuaccccgaggaccccgucaagcucgccuccaucgucaaggccuccuucgaggagggcaagugcggccucaacuccgucgacucccucgagcacgagauguggcgcucccgcgccgacgagaucaacgccaucuucgaggagaacgaggucgacaucuccgucgucguccaggaccccaagaacgucuaccagcgcggcacccaccccuucucccgcauccgcgacggccuccaguacggcuggaagaccuggggcaagaaccucgucuucucccccggccgcaagaacggcuccuucaucaucgacggcaagucccgcaaggagugccccuucuccaaccgcgucuggaacuccuuccagaucgaggaguucggcaccggcgucuucaccacccgcgucuacauggacgccgucuucgaguacaccaucgacugcgacggcuccauccucggcgccgccgucaacggcaagaaguccgcccacggcucccccaccuucuggaugggcucccacgaggucaacggcaccuggaugauccacacccucgaggcccucgacuacaaggagugcgaguggccccucacccacaccaucggcaccuccgucgaggaguccgagauguucaugccccgcuccaucggcggccccgucuccucccacaaccacauccccggcuacaagguccagaccaacggccccuggaugcaggucccccucgaggucaagcgcgaggccugccccggcaccuccgucaucaucgacggcaacugcgacggccgcggcaaguccacccgcuccaccaccgacuccggcaaggucauccccgaguggugcugccgcuccugcaccaugccccccgucuccuuccacggcuccgacggcugcugguaccccauggagauccgcccccgcaagacccacgagucccaccucguccgcuccugggucaccgccugaggacuagucccuguucccagagcccacuuuuuuuucuuuuuuugaaauaaaauagccugucuuucagaucuaaaaaaaaaaaaaaaaaaaaaaaaaaaaaaaaaaaaaaaaaaaaaaaaaaaaaaaaaaaaaaaaugcaucccccccccccccccccccccccccccccccaaaggcucuuuucagagccaccagaauu

SEQ ID NO: 2351 - RNA, 1561 nt, Artificial Sequence
  mRNA product Design d-1 comprising derived and/or modified sequence from YFV__NC_002031.1__eSS-NS1-Y (polyprotein: aa758-1177) (opt3)
gggagacccgugacccggaaguuguacggcuacgcgacuuucccucccacaaacccucgcgcccuuccuuuccuacuugggcccggcagaaagcuuaccaugagcauguccaugauccuggugggcgucauuaugauguuccucucucuugggguuggagccgaccaggguugcgcuauaaacuuuggcaagagagagcugaaauguggggauggaaucuucauuuuuagggacucagaugacugguugaauaaguacaguuauuaccccgaagauccugugaaauuagcaagcaucguaaaggccuccuucgaggaaggcaaaugcggucugaacucuguggacucgcuagagcacgaaauguggcggucacgcgcggaugagauuaaugcuaucuuugaggaaaacgaggucgacauaagcgugguugugcaagauccaaagaaugucuaucagcgagggacccauccguucagucguaucagagacggacuccaguacggcuggaagacauggggcaaaaaccugguguuuucccccgggaggaagaauggaucuuucauuaucgaugguaaaagccggaaggaauguccuuuuuccaaccgcguauggaacucauuccagauugaggaguuuggcacugggguuuucacgaccagaguguauauggacgccgucuuugaauacacaaucgauugcgacggaaguauacuuggcgcagccgugaaugguaaaaagagcgcucacgggucuccaacuuucuggaugggaucccaugaggugaauggcaccuggaugauucacacacuggaagcauuggacuauaaggagugugaauggccccucacccauacuaucggcacaucagucgaggagagcgaaauguucaugccuaggaguauugggggaccaguuucuucccacaaccacauccccgguuacaaagugcaaaccaauggcccuuggaugcagguaccacuggaggugaagcgggaagccugcccggggacgagcgucaucauugauggaaacugugacggccgcgguaaaucgacucgaucuaccacagauuccgggaaggugauacccgaguggugcuguagaucaugcacuaugccuccaguuaguuuucauggcagcgacggauguugguaccccauggaaaucaggccucggaaaacccacgagucccaucuggugcguucuugggucacagcuggcgagauucacgccgugccauucgggcucguaagcaugaugaucgcgauggaaguuguguuacgcaagagacagggacccaaacagaugcuggucgguggcgugguccuuuugggggcaaugcuggugggacaaguuaccugaggacuagucccuguucccagagcccacuuuuuuuucuuuuuuugaaauaaaauagccugucuuucagaucuaaaaaaaaaaaaaaaaaaaaaaaaaaaaaaaaaaaaaaaaaaaaaaaaaaaaaaaaaaaaaaaaugcaucccccccccccccccccccccccccccccccaaaggcucuuuucagagccaccagaauu

SEQ ID NO: 2352 - RNA, 1420 nt, Artificial Sequence
  mRNA product Design d-1 comprising derived and/or modified sequence from YFV__NC_002031.1__eSS-NS1 (polyprotein: aa758-1130) (opt3)
gggagacccgugacccggaaguuguacggcuacgcgacuuucccucccacaaacccucgcgcccuuccuuuccuacuugggcccggcagaaagcuuaccaugagcauguccaugauccuggugggcgucauuaugauguuccucucucuugggguuggagccgaccaggguugcgcuauaaacuuuggcaagagagagcugaaauguggggauggaaucuucauuuuuagggacucagaugacugguugaauaaguacaguuauuaccccgaagauccugugaaauuagcaagcaucguaaaggccuccuucgaggaaggcaaaugcggucugaacucuguggacucgcuagagcacgaaauguggcggucacgcgcggaugagauuaaugcuaucuuugaggaaaacgaggucgacauaagcgugguugugcaagauccaaagaaugucuaucagcgagggacccauccguucagucguaucagagacggacuccaguacggcuggaagacauggggcaaaaaccugguguuuucccccgggaggaagaauggaucuuucauuaucgaugguaaaagccggaaggaauguccuuuuuccaaccgcguauggaacucauuccagauugaggaguuuggcacugggguuuucacgaccagaguguauauggacgccgucuuugaauacacaaucgauugcgacggaaguauacuuggcgcagccgugaaugguaaaaagagcgcucacgggucuccaacuuucuggaugggaucccaugaggugaauggcaccuggaugauucacacacuggaagcauuggacuauaaggagugugaauggccccucacccauacuaucggcacaucagucgaggagagcgaaauguucaugccuaggaguauugggggaccaguuucuucccacaaccacauccccgguuacaaagugcaaaccaauggcccuuggaugcagguaccacuggaggugaagcgggaagccugcccggggacgagcgucaucauugauggaaacugugacggccgcgguaaaucgacucgaucuaccacagauuccgggaaggugauacccgaguggugcuguagaucaugcacuaugccuccaguuaguuuucauggcagcgacggauguugguaccccauggaaaucaggccucggaaaacccacgagucccaucuggugcguucuugggucacagcuugaggacuagucccuguucccagagcccacuuuuuuuucuuuuuuugaaauaaaauagccugucuuucagaucuaaaaaaaaaaaaaaaaaaaaaaaaaaaaaaaaaaaaaaaaaaaaaaaaaaaaaaaaaaaaaaaaugcaucccccccccccccccccccccccccccccccaaaggcucuuuucagagccaccagaauu

SEQ ID NO: 2353 - RNA, 1411 nt, Artificial Sequence
  mRNA product Design d-1 comprising derived and/or modified sequence from YFV__NC_002031.1__SSIgE-NS1 (polyprotein: aa779-1130) (opt3)
gggagacccgugacccggaaguuguacggcuacgcgacuuucccucccacaaacccucgcgcccuuccuuuccuacuugggcccggcagaaagcuuaccauggacuggaccuggauccuguuccucguggccgcugcaacaagaguccacagcgaccaggguugcgcuauaaacuuuggcaagagagagcugaaauguggggauggaaucuucauuuuuagggacucagaugacugguugaauaaguacaguuauuaccccgaagauccugugaaauuagcaagcaucguaaaggccuccuucgaggaaggcaaaugcggucugaacucuguggacucgcuagagcacgaaauguggcggucacgcgcggaugagauuaaugcuaucuuugaggaaaacgaggucgacauaagcgugguugugcaagauccaaagaaugucuaucagcgagggacccauccguucagucguaucagagacggacuccaguacggcuggaagacauggggcaaaaaccugguguuuucccccgggaggaagaauggaucuuucauuaucgaugguaaaagccggaaggaauguccuuuuuccaaccgcguauggaacucauuccagauugaggaguuuggcacugggguuuucacgaccagaguguauauggacgccgucuuugaauacacaaucgauugcgacggaaguauacuuggcgcagccgugaaugguaaaaagagcgcucacgggucuccaacuuucuggaugggaucccaugaggugaauggcaccuggaugauucacacacuggaagcauuggacuauaaggagugugaauggccccucacccauacuaucggcacaucagucgaggagagcgaaauguucaugccuaggaguauugggggaccaguuucuucccacaaccacauccccgguuacaaagugcaaaccaauggcccuuggaugcagguaccacuggaggugaagcgggaagccugcccggggacgagcgucaucauugauggaaacugugacggccgcgguaaaucgacucgaucuaccacagauuccgggaaggugauacccgaguggugcuguagaucaugcacuaugccuccaguuaguuuucauggcagcgacggauguugguaccccauggaaaucaggccucggaaaacccacgagucccaucuggugcguucuugggucacagcuugaggacuagucccuguucccagagcccacuuuuuuuucuuuuuuugaaauaaaauagccugucuuucagaucuaaaaaaaaaaaaaaaaaaaaaaaaaaaaaaaaaaaaaaaaaaaaaaaaaaaaaaaaaaaaaaaaugcaucccccccccccccccccccccccccccccccaaaggcucuuuucagagccaccagaauu

SEQ ID NO: 2354 - RNA, 1561 nt, Artificial Sequence
  mRNA product Design d-1 comprising derived and/or modified sequence from YFV__NC_002031.1__eSS-NS1-Y (polyprotein: aa758-1177) (opt4)
gggagacccgugacccggaaguuguacggcuacgcgacuuucccucccacaaacccucgcgcccuuccuuuccuacuugggcccggcagaaagcuuaccaugagcaugagcaugauccuggugggcgugaucaugauguuccugagccugggcgugggcgccgaccagggcugcgccaucaacuucggcaagagagagcugaagugcggcgacggcaucuucaucuucagagacagcgacgacuggcugaacaaguacagcuacuaccccgaggaccccgugaagcuggccagcaucgugaaggccagcuucgaggagggcaagugcggccugaacagcguggacagccuggagcacgagauguggagaagcagagccgacgagaucaacgccaucuucgaggagaacgagguggacaucagcgugguggugcaggaccccaagaacguguaccagagaggcacccaccccuucagcagaaucagagacggccugcaguacggcuggaagaccuggggcaagaaccugguguucagccccggcagaaagaacggcagcuucaucaucgacggcaagagcagaaaggagugccccuucagcaacagaguguggaacagcuuccagaucgaggaguucggcaccggcguguucaccaccagaguguacauggacgccguguucgaguacaccaucgacugcgacggcagcauccugggcgccgccgugaacggcaagaagagcgcccacggcagccccaccuucuggaugggcagccacgaggugaacggcaccuggaugauccacacccuggaggcccuggacuacaaggagugcgaguggccccugacccacaccaucggcaccagcguggaggagagcgagauguucaugcccagaagcaucggcggccccgugagcagccacaaccacauccccggcuacaaggugcagaccaacggccccuggaugcaggugccccuggaggugaagagagaggccugccccggcaccagcgugaucaucgacggcaacugcgacggcagaggcaagagcaccagaagcaccaccgacagcggcaaggugauccccgaguggugcugcagaagcugcaccaugccccccgugagcuuccacggcagcgacggcugcugguaccccauggagaucagacccagaaagacccacgagagccaccuggugagaagcugggugaccgccggcgagauccacgccgugcccuucggccuggugagcaugaugaucgccauggagguggugcugagaaagagacagggccccaagcagaugcuggugggcggcguggugcugcugggcgccaugcuggugggccaggugaccugaggacuagucccuguucccagagcccacuuuuuuuucuuuuuuugaaauaaaauagccugucuuucagaucuaaaaaaaaaaaaaaaaaaaaaaaaaaaaaaaaaaaaaaaaaaaaaaaaaaaaaaaaaaaaaaaaugcaucccccccccccccccccccccccccccccccaaaggcucuuuucagagccaccagaauu

SEQ ID NO: 2355 - RNA, 1420 nt, Artificial Sequence
  mRNA product Design d-1 comprising derived and/or modified sequence from YFV__NC_002031.1__eSS-NS1 (polyprotein: aa758-1130) (opt4)
gggagacccgugacccggaaguuguacggcuacgcgacuuucccucccacaaacccucgcgcccuuccuuuccuacuugggcccggcagaaagcuuaccaugagcaugagcaugauccuggugggcgugaucaugauguuccugagccugggcgugggcgccgaccagggcugcgccaucaacuucggcaagagagagcugaagugcggcgacggcaucuucaucuucagagacagcgacgacuggcugaacaaguacagcuacuaccccgaggaccccgugaagcuggccagcaucgugaaggccagcuucgaggagggcaagugcggccugaacagcguggacagccuggagcacgagauguggagaagcagagccgacgagaucaacgccaucuucgaggagaacgagguggacaucagcgugguggugcaggaccccaagaacguguaccagagaggcacccaccccuucagcagaaucagagacggccugcaguacggcuggaagaccuggggcaagaaccugguguucagccccggcagaaagaacggcagcuucaucaucgacggcaagagcagaaaggagugccccuucagcaacagaguguggaacagcuuccagaucgaggaguucggcaccggcguguucaccaccagaguguacauggacgccguguucgaguacaccaucgacugcgacggcagcauccugggcgccgccgugaacggcaagaagagcgcccacggcagccccaccuucuggaugggcagccacgaggugaacggcaccuggaugauccacacccuggaggcccuggacuacaaggagugcgaguggccccugacccacaccaucggcaccagcguggaggagagcgagauguucaugcccagaagcaucggcggccccgugagcagccacaaccacauccccggcuacaaggugcagaccaacggccccuggaugcaggugccccuggaggugaagagagaggccugccccggcaccagcgugaucaucgacggcaacugcgacggcagaggcaagagcaccagaagcaccaccgacagcggcaaggugauccccgaguggugcugcagaagcugcaccaugccccccgugagcuuccacggcagcgacggcugcugguaccccauggagaucagacccagaaagacccacgagagccaccuggugagaagcugggugaccgccugaggacuagucccuguucccagagcccacuuuuuuuucuuuuuuugaaauaaaauagccugucuuucagaucuaaaaaaaaaaaaaaaaaaaaaaaaaaaaaaaaaaaaaaaaaaaaaaaaaaaaaaaaaaaaaaaaugcaucccccccccccccccccccccccccccccccaaaggcucuuuucagagccaccagaauu

SEQ ID NO: 2356 - RNA, 1411 nt, Artificial Sequence
  mRNA product Design d-1 comprising derived and/or modified sequence from YFV__NC_002031.1__SSIgE-NS1 (polyprotein: aa779-1130) (opt4)
gggagacccgugacccggaaguuguacggcuacgcgacuuucccucccacaaacccucgcgcccuuccuuuccuacuugggcccggcagaaagcuuaccauggacuggaccuggauccuguuccugguggccgccgccaccagagugcacagcgaccagggcugcgccaucaacuucggcaagagagagcugaagugcggcgacggcaucuucaucuucagagacagcgacgacuggcugaacaaguacagcuacuaccccgaggaccccgugaagcuggccagcaucgugaaggccagcuucgaggagggcaagugcggccugaacagcguggacagccuggagcacgagauguggagaagcagagccgacgagaucaacgccaucuucgaggagaacgagguggacaucagcgugguggugcaggaccccaagaacguguaccagagaggcacccaccccuucagcagaaucagagacggccugcaguacggcuggaagaccuggggcaagaaccugguguucagccccggcagaaagaacggcagcuucaucaucgacggcaagagcagaaaggagugccccuucagcaacagaguguggaacagcuuccagaucgaggaguucggcaccggcguguucaccaccagaguguacauggacgccguguucgaguacaccaucgacugcgacggcagcauccugggcgccgccgugaacggcaagaagagcgcccacggcagccccaccuucuggaugggcagccacgaggugaacggcaccuggaugauccacacccuggaggcccuggacuacaaggagugcgaguggccccugacccacaccaucggcaccagcguggaggagagcgagauguucaugcccagaagcaucggcggccccgugagcagccacaaccacauccccggcuacaaggugcagaccaacggccccuggaugcaggugccccuggaggugaagagagaggccugccccggcaccagcgugaucaucgacggcaacugcgacggcagaggcaagagcaccagaagcaccaccgacagcggcaaggugauccccgaguggugcugcagaagcugcaccaugccccccgugagcuuccacggcagcgacggcugcugguaccccauggagaucagacccagaaagacccacgagagccaccuggugagaagcugggugaccgccugaggacuagucccuguucccagagcccacuuuuuuuucuuuuuuugaaauaaaauagccugucuuucagaucuaaaaaaaaaaaaaaaaaaaaaaaaaaaaaaaaaaaaaaaaaaaaaaaaaaaaaaaaaaaaaaaaugcaucccccccccccccccccccccccccccccccaaaggcucuuuucagagccaccagaauu

SEQ ID NO: 2357 - RNA, 1561 nt, Artificial Sequence
  mRNA product Design d-1 comprising derived and/or modified sequence from YFV__NC_002031.1__eSS-NS1-Y (polyprotein: aa758-1177) (opt5)
gggagacccgugacccggaaguuguacggcuacgcgacuuucccucccacaaacccucgcgcccuuccuuuccuacuugggcccggcagaaagcuuaccaugagcauguccaugauccuggugggcgucauuaugauguuccucucucuggggguuggagccgaccagggcugcgcuaucaacuuugggaagagagagcuuaaauguggagauggcauuuucaucuuucgggacagcgaugacuggcugaauaaguacuccuauuaccccgaagauccugugaaacucgccucuauugugaaggcgagcuucgaggaagggaaaugcggacugaacuccgucgacucucuugagcacgaaauguggcgcagcagagcugaugagaucaaugccaucuuugaggaaaacgagguggacauuuccguugugguccaagauccgaagaauguguaucagcggggcacccaucccuucagccgcaucagagacggccugcaguacggguggaagacauggggcaaaaaccucguguuuucuccuggacggaagaauggguccuucauuaucgauggaaaaagccgcaaggaaugucccuuuucuaacagaguguggaacuccuuccagauugaggaguuuggcacgggggucuucaccacacggguguauauggacgccguguuugaauacaccaucgauugcgacggaagcauucugggcgcugccgucaauggcaaaaagucugcucacggguccccuacauucuggaugggaagccaugagguuaauggcaccuggaugauccacacacuggaagcccucgacuauaaggagugugaauggccccugacccauacgaucgggaccuccguggaggagucugaaauguucaugccucgcagcauuggaggcccgguguccagccacaaccacauccccggguacaaaguccaaacaaauggaccuuggaugcagguuccccuugagguuaagagagaagcgugcccuggcaccucugugauuaucgauggcaacugugacgggcggggaaaauccacacgcagcaccacggauucuggcaaggucauucccgaguggugcuguagaagcugcacaaugccgccuguguccuuucaugggucugacggauguugguaccccauggaaauccggccucgcaaaacccacgagagccaucugguuagauccugggugacagccggcgagauccacgcuguccccuucgggcucgugagcaugaugauugccauggaagucgugcugcggaagagacagggccccaaacagaugcuuguuggaggcgugguccugcucggggcuaugcuggugggacaaguuaccugaggacuagucccuguucccagagcccacuuuuuuuucuuuuuuugaaauaaaauagccugucuuucagaucuaaaaaaaaaaaaaaaaaaaaaaaaaaaaaaaaaaaaaaaaaaaaaaaaaaaaaaaaaaaaaaaaugcaucccccccccccccccccccccccccccccccaaaggcucuuuucagagccaccagaauu

SEQ ID NO: 2358 - RNA, 1420 nt, Artificial Sequence
  mRNA product Design d-1 comprising derived and/or modified sequence from YFV__NC_002031.1__eSS-NS1 (polyprotein: aa758-1130) (opt5)
gggagacccgugacccggaaguuguacggcuacgcgacuuucccucccacaaacccucgcgcccuuccuuuccuacuugggcccggcagaaagcuuaccaugagcauguccaugauccuggugggcgucauuaugauguuccucucucuggggguuggagccgaccagggcugcgcuaucaacuuugggaagagagagcuuaaauguggagauggcauuuucaucuuucgggacagcgaugacuggcugaauaaguacuccuauuaccccgaagauccugugaaacucgccucuauugugaaggcgagcuucgaggaagggaaaugcggacugaacuccgucgacucucuugagcacgaaauguggcgcagcagagcugaugagaucaaugccaucuuugaggaaaacgagguggacauuuccguugugguccaagauccgaagaauguguaucagcggggcacccaucccuucagccgcaucagagacggccugcaguacggguggaagacauggggcaaaaaccucguguuuucuccuggacggaagaauggguccuucauuaucgauggaaaaagccgcaaggaaugucccuuuucuaacagaguguggaacuccuuccagauugaggaguuuggcacgggggucuucaccacacggguguauauggacgccguguuugaauacaccaucgauugcgacggaagcauucugggcgcugccgucaauggcaaaaagucugcucacggguccccuacauucuggaugggaagccaugagguuaauggcaccuggaugauccacacacuggaagcccucgacuauaaggagugugaauggccccugacccauacgaucgggaccuccguggaggagucugaaauguucaugccucgcagcauuggaggcccgguguccagccacaaccacauccccggguacaaaguccaaacaaauggaccuuggaugcagguuccccuugagguuaagagagaagcgugcccuggcaccucugugauuaucgauggcaacugugacgggcggggaaaauccacacgcagcaccacggauucuggcaaggucauucccgaguggugcuguagaagcugcacaaugccgccuguguccuuucaugggucugacggauguugguaccccauggaaauccggccucgcaaaacccacgagagccaucugguuagauccugggugacagccugaggacuagucccuguucccagagcccacuuuuuuuucuuuuuuugaaauaaaauagccugucuuucagaucuaaaaaaaaaaaaaaaaaaaaaaaaaaaaaaaaaaaaaaaaaaaaaaaaaaaaaaaaaaaaaaaaugcaucccccccccccccccccccccccccccccccaaaggcucuuuucagagccaccagaauu

SEQ ID NO: 2359 - RNA, 1411 nt, Artificial Sequence
  mRNA product Design d-1 comprising derived and/or modified sequence from YFV__NC_002031.1__SSIgE-NS1 (polyprotein: aa779-1130) (opt5)
gggagacccgugacccggaaguuguacggcuacgcgacuuucccucccacaaacccucgcgcccuuccuuuccuacuugggcccggcagaaagcuuaccauggacuggaccuggauccuguuccucguggccgcugccacaagaguccacagcgaccagggcugcgcuaucaacuuugggaagagagagcuuaaauguggagauggcauuuucaucuuucgggacagcgaugacuggcugaauaaguacuccuauuaccccgaagauccugugaaacucgccucuauugugaaggcgagcuucgaggaagggaaaugcggacugaacuccgucgacucucuugagcacgaaauguggcgcagcagagcugaugagaucaaugccaucuuugaggaaaacgagguggacauuuccguugugguccaagauccgaagaauguguaucagcggggcacccaucccuucagccgcaucagagacggccugcaguacggguggaagacauggggcaaaaaccucguguuuucuccuggacggaagaauggguccuucauuaucgauggaaaaagccgcaaggaaugucccuuuucuaacagaguguggaacuccuuccagauugaggaguuuggcacgggggucuucaccacacggguguauauggacgccguguuugaauacaccaucgauugcgacggaagcauucugggcgcugccgucaauggcaaaaagucugcucacggguccccuacauucuggaugggaagccaugagguuaauggcaccuggaugauccacacacuggaagcccucgacuauaaggagugugaauggccccugacccauacgaucgggaccuccguggaggagucugaaauguucaugccucgcagcauuggaggcccgguguccagccacaaccacauccccggguacaaaguccaaacaaauggaccuuggaugcagguuccccuugagguuaagagagaagcgugcccuggcaccucugugauuaucgauggcaacugugacgggcggggaaaauccacacgcagcaccacggauucuggcaaggucauucccgaguggugcuguagaagcugcacaaugccgccuguguccuuucaugggucugacggauguugguaccccauggaaauccggccucgcaaaacccacgagagccaucugguuagauccugggugacagccugaggacuagucccuguucccagagcccacuuuuuuuucuuuuuuugaaauaaaauagccugucuuucagaucuaaaaaaaaaaaaaaaaaaaaaaaaaaaaaaaaaaaaaaaaaaaaaaaaaaaaaaaaaaaaaaaaugcaucccccccccccccccccccccccccccccccaaaggcucuuuucagagccaccagaauu

SEQ ID NO: 2360 - RNA, 1561 nt, Artificial Sequence
  mRNA product Design d-1 comprising derived and/or modified sequence from YFV__NC_002031.1__eSS-NS1-Y (polyprotein: aa758-1177) (opt6)
gggagacccgugacccggaaguuguacggcuacgcgacuuucccucccacaaacccucgcgcccuuccuuuccuacuugggcccggcagaaagcuuaccaugucaaugaguaugauauuaguagggguaauaaugauguuccuuagcuuaggaguaggagcagaucaaggaugugcaauaaauuuuggaaaaagagaacuaaaaugcggagacgguauauuuauauuuagagauagugaugauuggcuaaauaaauauaguuacuauccagaagauccaguuaaauuagccucaauaguaaaagcuagcuuugaagaaggaaaauguggacuaaauucaguagacagucuagaacacgaaauguggagaucaagggcagaugaaauaaaugcaaucuuugaagaaaaugaaguggauauaucagugguaguacaagauccaaaaaauguguaccaaagaggaacacauccauuuaguaggauaagagauggauuacaauauggauggaaaacauggggaaaaaauuuaguauuuaguccaggaagaaaaaauggaucauuuauaauagaugggaaaagccgaaaagaauguccauuuucaaacagaguauggaacucauuucaaauugaagaauuuggaacaggaguauuuacaacaagaguauauauggaugcaguauuugaauacaccauagauugugauggaaguauauuaggagcagcaguaaaugggaaaaaaagcgcucacggaaguccaacguuuuggaugggaucacacgagguaaauggcacguggaugauacauacuuuagaagcauuagauuacaaagaaugugaauggccauuaacucauacaauagguacaagcguagaagaaagugagauguuuaugccacguucaaucggggggccaguaucaagucauaaccauauaccaggauauaaaguacaaacgaauggaccuuggaugcaaguaccacuagaaguaaaacgagaagcaugcccaggaacgucaguaauaauagauggaaauugugauggcagggguaaaagcacaagaucaacaacagauucaggaaaaguaauaccugaaugguguuguagaaguuguacaaugccaccaguaucauuccauggaagugauggaugcugguauccaauggaaauuagaccaagaaaaacucaugaaagucauuuaguaagaucuuggguaacugcaggagaaauacaugcaguaccauuugguuuaguaaguaugaugauagcaauggaaguaguucuaagaaaaaggcaagggccuaaacaaaugcuagugggaggaguaguauugcuaggugcaauguuaguaggccaaguaaccugaggacuagucccuguucccagagcccacuuuuuuuucuuuuuuugaaauaaaauagccugucuuucagaucuaaaaaaaaaaaaaaaaaaaaaaaaaaaaaaaaaaaaaaaaaaaaaaaaaaaaaaaaaaaaaaaaugcaucccccccccccccccccccccccccccccccaaaggcucuuuucagagccaccagaauu

SEQ ID NO: 2361 - RNA, 1420 nt, Artificial Sequence
  mRNA product Design d-1 comprising derived and/or modified sequence from YFV__NC_002031.1__eSS-NS1 (polyprotein: aa758-1130) (opt6)
gggagacccgugacccggaaguuguacggcuacgcgacuuucccucccacaaacccucgcgcccuuccuuuccuacuugggcccggcagaaagcuuaccaugucaaugaguaugauauuaguagggguaauaaugauguuccuuagcuuaggaguaggagcagaucaaggaugugcaauaaauuuuggaaaaagagaacuaaaaugcggagacgguauauuuauauuuagagauagugaugauuggcuaaauaaauauaguuacuauccagaagauccaguuaaauuagccucaauaguaaaagcuagcuuugaagaaggaaaauguggacuaaauucaguagacagucuagaacacgaaauguggagaucaagggcagaugaaauaaaugcaaucuuugaagaaaaugaaguggauauaucagugguaguacaagauccaaaaaauguguaccaaagaggaacacauccauuuaguaggauaagagauggauuacaauauggauggaaaacauggggaaaaaauuuaguauuuaguccaggaagaaaaaauggaucauuuauaauagaugggaaaagccgaaaagaauguccauuuucaaacagaguauggaacucauuucaaauugaagaauuuggaacaggaguauuuacaacaagaguauauauggaugcaguauuugaauacaccauagauugugauggaaguauauuaggagcagcaguaaaugggaaaaaaagcgcucacggaaguccaacguuuuggaugggaucacacgagguaaauggcacguggaugauacauacuuuagaagcauuagauuacaaagaaugugaauggccauuaacucauacaauagguacaagcguagaagaaagugagauguuuaugccacguucaaucggggggccaguaucaagucauaaccauauaccaggauauaaaguacaaacgaauggaccuuggaugcaaguaccacuagaaguaaaacgagaagcaugcccaggaacgucaguaauaauagauggaaauugugauggcagggguaaaagcacaagaucaacaacagauucaggaaaaguaauaccugaaugguguuguagaaguuguacaaugccaccaguaucauuccauggaagugauggaugcugguauccaauggaaauuagaccaagaaaaacucaugaaagucauuuaguaagaucuuggguaacugcaugaggacuagucccuguucccagagcccacuuuuuuuucuuuuuuugaaauaaaauagccugucuuucagaucuaaaaaaaaaaaaaaaaaaaaaaaaaaaaaaaaaaaaaaaaaaaaaaaaaaaaaaaaaaaaaaaaugcaucccccccccccccccccccccccccccccccaaaggcucuuuucagagccaccagaauu

SEQ ID NO: 2362 - RNA, 1411 nt, Artificial Sequence
  mRNA product Design d-1 comprising derived and/or modified sequence from YFV__NC_002031.1__SSIgE-NS1 (polyprotein: aa779-1130) (opt6)
gggagacccgugacccggaaguuguacggcuacgcgacuuucccucccacaaacccucgcgcccuuccuuuccuacuugggcccggcagaaagcuuaccauggacuggacauggauauuauuuuuaguagcagcagcaacaagaguacauucagaucaaggaugugcaauaaauuuuggaaaaagagaacuaaaaugcggagacgguauauuuauauuuagagauagugaugauuggcuaaauaaauauaguuacuauccagaagauccaguuaaauuagccucaauaguaaaagcuagcuuugaagaaggaaaauguggacuaaauucaguagacagucuagaacacgaaauguggagaucaagggcagaugaaauaaaugcaaucuuugaagaaaaugaaguggauauaucagugguaguacaagauccaaaaaauguguaccaaagaggaacacauccauuuaguaggauaagagauggauuacaauauggauggaaaacauggggaaaaaauuuaguauuuaguccaggaagaaaaaauggaucauuuauaauagaugggaaaagccgaaaagaauguccauuuucaaacagaguauggaacucauuucaaauugaagaauuuggaacaggaguauuuacaacaagaguauauauggaugcaguauuugaauacaccauagauugugauggaaguauauuaggagcagcaguaaaugggaaaaaaagcgcucacggaaguccaacguuuuggaugggaucacacgagguaaauggcacguggaugauacauacuuuagaagcauuagauuacaaagaaugugaauggccauuaacucauacaauagguacaagcguagaagaaagugagauguuuaugccacguucaaucggggggccaguaucaagucauaaccauauaccaggauauaaaguacaaacgaauggaccuuggaugcaaguaccacuagaaguaaaacgagaagcaugcccaggaacgucaguaauaauagauggaaauugugauggcagggguaaaagcacaagaucaacaacagauucaggaaaaguaauaccugaaugguguuguagaaguuguacaaugccaccaguaucauuccauggaagugauggaugcugguauccaauggaaauuagaccaagaaaaacucaugaaagucauuuaguaagaucuuggguaacugcaugaggacuagucccuguucccagagcccacuuuuuuuucuuuuuuugaaauaaaauagccugucuuucagaucuaaaaaaaaaaaaaaaaaaaaaaaaaaaaaaaaaaaaaaaaaaaaaaaaaaaaaaaaaaaaaaaaugcaucccccccccccccccccccccccccccccccaaaggcucuuuucagagccaccagaauu

SEQ ID NO: 2363 - RNA, 1561 nt, Artificial Sequence
  mRNA product Design d-1 comprising derived and/or modified sequence from YFV__NC_002031.1__eSS-NS1-Y (polyprotein: aa758-1177) (opt11)
gggagacccgugacccggaaguuguacggcuacgcgacuuucccucccacaaacccucgcgcccuuccuuuccuacuugggcccggcagaaagcuuaccaugagcaugagcaugaucuugguaggggucauaaugauguucuugagccuagggguaggcgcagaccagggaugcgcgauaaacuucggcaaacgcgaacucaaaugcggggacggaaucuucaucuuucgcgacagugacgacuggcuaaacaaguacaguuacuacccggaagaccccguaaaacuagccucaauaguaaaagcgagcuucgaagaaggaaagugcgggcuaaacagcguggacucccuagagcacgagauguggaggucgagagcggacgagaucaacgccauauucgaagaaaaugaaguagacauaagcguagucguacaagaucccaaaaacguguaccagcgcggaacccaccccuucagcaggaucagagacgggcuacaauacggauggaagacauggggcaaaaaccuggucuucagcccgggcaggaaaaacggaucguucaucaucgauggcaaaagccgaaaggagugcccguucucaaacaggguauggaacucguuccagaucgaagaguucggcacaggcgucuucacgacaagagucuacauggacgcaguguucgaauacacaaucgacugcgacggcuccauacugggcgcagccgugaacgggaaaaagagcgcacacggaagcccgaccuuuuggauggguucgcacgaggugaacggaacauggaugauacacaccuuagaagcacucgauuacaaagaaugcgaauggcccuuaacccacaccaucgguacguccguagaagaaagcgaaauguucaugccgcgcucaaucggcggcccagucucgagccacaaccacaucccgggcuauaaaguacaaacaaacgggccauggaugcagguaccccucgaggucaagcgcgaagccugccccggaaccucggucaucaucgacggcaacugcgacggcaggggaaaaagcacgcgcucaaccacggacucgggaaagguaauaccagaguggugcugcaggagcugcaccaugccaccgguaucguuccacggcucagacggaugcugguacccgauggaaaucagacccagaaaaacgcacgagagccaccucguacgcucauggguaaccgcaggcgagauccacgccgugccauuuggacuggucucaaugaugauagcgauggaggucgugcucaggaagaggcaagggcccaagcaaaugcucguaggaggaguaguacuccugggcgcaaugcuggucggacaggugaccugaggacuagucccuguucccagagcccacuuuuuuuucuuuuuuugaaauaaaauagccugucuuucagaucuaaaaaaaaaaaaaaaaaaaaaaaaaaaaaaaaaaaaaaaaaaaaaaaaaaaaaaaaaaaaaaaaugcaucccccccccccccccccccccccccccccccaaaggcucuuuucagagccaccagaauu

SEQ ID NO: 2364 - RNA, 1420 nt, Artificial Sequence
  mRNA product Design d-1 comprising derived and/or modified sequence from YFV__NC_002031.1__eSS-NS1 (polyprotein: aa758-1130) (opt11)
gggagacccgugacccggaaguuguacggcuacgcgacuuucccucccacaaacccucgcgcccuuccuuuccuacuugggcccggcagaaagcuuaccaugagcaugagcaugaucuugguaggggucauaaugauguucuugagccuagggguaggcgcagaccagggaugcgcgauaaacuucggcaaacgcgaacucaaaugcggggacggaaucuucaucuuucgcgacagugacgacuggcuaaacaaguacaguuacuacccggaagaccccguaaaacuagccucaauaguaaaagcgagcuucgaagaaggaaagugcgggcuaaacagcguggacucccuagagcacgagauguggaggucgagagcggacgagaucaacgccauauucgaagaaaaugaaguagacauaagcguagucguacaagaucccaaaaacguguaccagcgcggaacccaccccuucagcaggaucagagacgggcuacaauacggauggaagacauggggcaaaaaccuggucuucagcccgggcaggaaaaacggaucguucaucaucgauggcaaaagccgaaaggagugcccguucucaaacaggguauggaacucguuccagaucgaagaguucggcacaggcgucuucacgacaagagucuacauggacgcaguguucgaauacacaaucgacugcgacggcuccauacugggcgcagccgugaacgggaaaaagagcgcacacggaagcccgaccuuuuggauggguucgcacgaggugaacggaacauggaugauacacaccuuagaagcacucgauuacaaagaaugcgaauggcccuuaacccacaccaucgguacguccguagaagaaagcgaaauguucaugccgcgcucaaucggcggcccagucucgagccacaaccacaucccgggcuauaaaguacaaacaaacgggccauggaugcagguaccccucgaggucaagcgcgaagccugccccggaaccucggucaucaucgacggcaacugcgacggcaggggaaaaagcacgcgcucaaccacggacucgggaaagguaauaccagaguggugcugcaggagcugcaccaugccaccgguaucguuccacggcucagacggaugcugguacccgauggaaaucagacccagaaaaacgcacgagagccaccucguacgcucauggguaaccgcaugaggacuagucccuguucccagagcccacuuuuuuuucuuuuuuugaaauaaaauagccugucuuucagaucuaaaaaaaaaaaaaaaaaaaaaaaaaaaaaaaaaaaaaaaaaaaaaaaaaaaaaaaaaaaaaaaaugcaucccccccccccccccccccccccccccccccaaaggcucuuuucagagccaccagaauu

SEQ ID NO: 2365 - RNA, 1411 nt, Artificial Sequence
  mRNA product Design d-1 comprising derived and/or modified sequence from YFV__NC_002031.1__SSIgE-NS1 (polyprotein: aa779-1130) (opt11)
gggagacccgugacccggaaguuguacggcuacgcgacuuucccucccacaaacccucgcgcccuuccuuuccuacuugggcccggcagaaagcuuaccauggauuggacguggauacucuuucucguggccgcggccacgcgcgugcacucggaccagggaugcgcgauaaacuucggcaaacgcgaacucaaaugcggggacggaaucuucaucuuucgcgacagugacgacuggcuaaacaaguacaguuacuacccggaagaccccguaaaacuagccucaauaguaaaagcgagcuucgaagaaggaaagugcgggcuaaacagcguggacucccuagagcacgagauguggaggucgagagcggacgagaucaacgccauauucgaagaaaaugaaguagacauaagcguagucguacaagaucccaaaaacguguaccagcgcggaacccaccccuucagcaggaucagagacgggcuacaauacggauggaagacauggggcaaaaaccuggucuucagcccgggcaggaaaaacggaucguucaucaucgauggcaaaagccgaaaggagugcccguucucaaacaggguauggaacucguuccagaucgaagaguucggcacaggcgucuucacgacaagagucuacauggacgcaguguucgaauacacaaucgacugcgacggcuccauacugggcgcagccgugaacgggaaaaagagcgcacacggaagcccgaccuuuuggauggguucgcacgaggugaacggaacauggaugauacacaccuuagaagcacucgauuacaaagaaugcgaauggcccuuaacccacaccaucgguacguccguagaagaaagcgaaauguucaugccgcgcucaaucggcggcccagucucgagccacaaccacaucccgggcuauaaaguacaaacaaacgggccauggaugcagguaccccucgaggucaagcgcgaagccugccccggaaccucggucaucaucgacggcaacugcgacggcaggggaaaaagcacgcgcucaaccacggacucgggaaagguaauaccagaguggugcugcaggagcugcaccaugccaccgguaucguuccacggcucagacggaugcugguacccgauggaaaucagacccagaaaaacgcacgagagccaccucguacgcucauggguaaccgcaugaggacuagucccuguucccagagcccacuuuuuuuucuuuuuuugaaauaaaauagccugucuuucagaucuaaaaaaaaaaaaaaaaaaaaaaaaaaaaaaaaaaaaaaaaaaaaaaaaaaaaaaaaaaaaaaaaugcaucccccccccccccccccccccccccccccccaaaggcucuuuucagagccaccagaauu

SEQ ID NO: 2366 - RNA, 1712 nt, Artificial Sequence
  mRNA product Design d-5 comprising derived and/or modified sequence from YFV__NC_002031.1__eSS-NS1-Y (polyprotein: aa758-1177) (wt)
gggagagggcgcuuggcuugcaaggacccugagcugcggcauugaagcacacccaacccaacucgacugaagucagccucacugaaccggaucugagaaucuucucucucugggcuugccagggcucuccgaaccuagcuagcauccucuucaauuccaacuagaaagcuuaccauguccaugagcaugaucuugguaggagugaucaugauguuuuugucucuaggaguuggggcggaucaaggaugcgccaucaacuuuggcaagagagagcucaagugcggagaugguaucuucauauuuagagacucugaugacuggcugaacaaguacucauacuauccagaagauccugugaagcuugcaucaauagugaaagccucuuuugaagaagggaaguguggccuaaauucaguugacucccuugagcaugagauguggagaagcagggcagaugagaucaaugccauuuuugaggaaaacgagguggacauuucuguugucgugcaggauccaaagaauguuuaccagagaggaacucauccauuuuccagaauucgggauggucugcaguaugguuggaagacuugggguaagaaccuuguguucuccccagggaggaagaauggaagcuucaucauagauggaaaguccaggaaagaaugcccguuuucaaaccgggucuggaauucuuuccagauagaggaguuugggacgggaguguucaccacacgcguguacauggacgcagucuuugaauacaccauagacugcgauggaucuaucuugggugcagcggugaacggaaaaaagagugcccauggcucuccaacauuuuggaugggaagucaugaaguaaaugggacauggaugauccacaccuuggaggcauuagauuacaaggagugugaguggccacugacacauacgauuggaacaucaguugaagagagugaaauguucaugccgagaucaaucggaggcccaguuagcucucacaaucauaucccuggauacaagguucagacgaacggaccuuggaugcagguaccacuagaagugaagagagaagcuugcccagggacuagcgugaucauugauggcaacugugauggacggggaaaaucaaccagauccaccacggauagcgggaaaguuauuccugaaugguguugccgcuccugcacaaugccgccugugagcuuccaugguagugauggguguugguaucccauggaaauuaggccaaggaaaacgcaugaaagccaucuggugcgcuccuggguuacagcuggagaaauacaugcugucccuuuugguuuggugagcaugaugauagcaauggaagugguccuaaggaaaagacagggaccaaagcaaauguugguuggaggaguagugcucuugggagcaaugcuggucgggcaaguaacuugaggacuaguggaagcauuuuccuggcugauuaaaagaaauuacucagcuauggucaucuguuccuguuagaaggcuaugcagcauauuauauacuaugcgcauguuaugaaaugcauaauaaaaaauuuuaaaaaaucuaaaagaucuaaaaaaaaaaaaaaaaaaaaaaaaaaaaaaaaaaaaaaaaaaaaaaaaaaaaaaaaaaaaaaaaugcaucccccccccccccccccccccccccccccccaaaggcucuuuucagagccaccagaauu

SEQ ID NO: 2367 - RNA, 1571 nt, Artificial Sequence
  mRNA product Design d-5 comprising derived and/or modified sequence from YFV__NC_002031.1__eSS-NS1 (polyprotein: aa758-1130) (wt)
gggagagggcgcuuggcuugcaaggacccugagcugcggcauugaagcacacccaacccaacucgacugaagucagccucacugaaccggaucugagaaucuucucucucugggcuugccagggcucuccgaaccuagcuagcauccucuucaauuccaacuagaaagcuuaccauguccaugagcaugaucuugguaggagugaucaugauguuuuugucucuaggaguuggggcggaucaaggaugcgccaucaacuuuggcaagagagagcucaagugcggagaugguaucuucauauuuagagacucugaugacuggcugaacaaguacucauacuauccagaagauccugugaagcuugcaucaauagugaaagccucuuuugaagaagggaaguguggccuaaauucaguugacucccuugagcaugagauguggagaagcagggcagaugagaucaaugccauuuuugaggaaaacgagguggacauuucuguugucgugcaggauccaaagaauguuuaccagagaggaacucauccauuuuccagaauucgggauggucugcaguaugguuggaagacuugggguaagaaccuuguguucuccccagggaggaagaauggaagcuucaucauagauggaaaguccaggaaagaaugcccguuuucaaaccgggucuggaauucuuuccagauagaggaguuugggacgggaguguucaccacacgcguguacauggacgcagucuuugaauacaccauagacugcgauggaucuaucuugggugcagcggugaacggaaaaaagagugcccauggcucuccaacauuuuggaugggaagucaugaaguaaaugggacauggaugauccacaccuuggaggcauuagauuacaaggagugugaguggccacugacacauacgauuggaacaucaguugaagagagugaaauguucaugccgagaucaaucggaggcccaguuagcucucacaaucauaucccuggauacaagguucagacgaacggaccuuggaugcagguaccacuagaagugaagagagaagcuugcccagggacuagcgugaucauugauggcaacugugauggacggggaaaaucaaccagauccaccacggauagcgggaaaguuauuccugaaugguguugccgcuccugcacaaugccgccugugagcuuccaugguagugauggguguugguaucccauggaaauuaggccaaggaaaacgcaugaaagccaucuggugcgcuccuggguuacagcuugaggacuaguggaagcauuuuccuggcugauuaaaagaaauuacucagcuauggucaucuguuccuguuagaaggcuaugcagcauauuauauacuaugcgcauguuaugaaaugcauaauaaaaaauuuuaaaaaaucuaaaagaucuaaaaaaaaaaaaaaaaaaaaaaaaaaaaaaaaaaaaaaaaaaaaaaaaaaaaaaaaaaaaaaaaugcaucccccccccccccccccccccccccccccccaaaggcucuuuucagagccaccagaauu

SEQ ID NO: 2368 - RNA, 1562 nt, Artificial Sequence
  mRNA product Design d-5 comprising derived and/or modified sequence from YFV__NC_002031.1__SSIgE-NS1 (polyprotein: aa779-1130) (wt)
gggagagggcgcuuggcuugcaaggacccugagcugcggcauugaagcacacccaacccaacucgacugaagucagccucacugaaccggaucugagaaucuucucucucugggcuugccagggcucuccgaaccuagcuagcauccucuucaauuccaacuagaaagcuuaccauggacuggaccuggauccuguuccucguggccgccgcgacccgcguccacagcgaucaaggaugcgccaucaacuuuggcaagagagagcucaagugcggagaugguaucuucauauuuagagacucugaugacuggcugaacaaguacucauacuauccagaagauccugugaagcuugcaucaauagugaaagccucuuuugaagaagggaaguguggccuaaauucaguugacucccuugagcaugagauguggagaagcagggcagaugagaucaaugccauuuuugaggaaaacgagguggacauuucuguugucgugcaggauccaaagaauguuuaccagagaggaacucauccauuuuccagaauucgggauggucugcaguaugguuggaagacuugggguaagaaccuuguguucuccccagggaggaagaauggaagcuucaucauagauggaaaguccaggaaagaaugcccguuuucaaaccgggucuggaauucuuuccagauagaggaguuugggacgggaguguucaccacacgcguguacauggacgcagucuuugaauacaccauagacugcgauggaucuaucuugggugcagcggugaacggaaaaaagagugcccauggcucuccaacauuuuggaugggaagucaugaaguaaaugggacauggaugauccacaccuuggaggcauuagauuacaaggagugugaguggccacugacacauacgauuggaacaucaguugaagagagugaaauguucaugccgagaucaaucggaggcccaguuagcucucacaaucauaucccuggauacaagguucagacgaacggaccuuggaugcagguaccacuagaagugaagagagaagcuugcccagggacuagcgugaucauugauggcaacugugauggacggggaaaaucaaccagauccaccacggauagcgggaaaguuauuccugaaugguguugccgcuccugcacaaugccgccugugagcuuccaugguagugauggguguugguaucccauggaaauuaggccaaggaaaacgcaugaaagccaucuggugcgcuccuggguuacagcuugaggacuaguggaagcauuuuccuggcugauuaaaagaaauuacucagcuauggucaucuguuccuguuagaaggcuaugcagcauauuauauacuaugcgcauguuaugaaaugcauaauaaaaaauuuuaaaaaaucuaaaagaucuaaaaaaaaaaaaaaaaaaaaaaaaaaaaaaaaaaaaaaaaaaaaaaaaaaaaaaaaaaaaaaaaugcaucccccccccccccccccccccccccccccccaaaggcucuuuucagagccaccagaauu

SEQ ID NO: 2369 - RNA, 1712 nt, Artificial Sequence
  mRNA product Design d-5 comprising derived and/or modified sequence from YFV__NC_002031.1__eSS-NS1-Y (polyprotein: aa758-1177) (opt1)
gggagagggcgcuuggcuugcaaggacccugagcugcggcauugaagcacacccaacccaacucgacugaagucagccucacugaaccggaucugagaaucuucucucucugggcuugccagggcucuccgaaccuagcuagcauccucuucaauuccaacuagaaagcuuaccaugagcauguccaugauccuggugggcgucaucaugauguuccucagccugggggugggcgccgaccaggggugcgccaucaacuucggcaagcgcgagcugaagugcggggacggcaucuucaucuuccgggacuccgacgacuggcucaacaaguacagcuacuaccccgaggacccggugaagcuggcguccaucgucaaggccagcuucgaggagggcaagugcgggcugaacuccguggacagccucgagcacgagauguggcgcucccgggccgacgagaucaacgccaucuucgaggagaacgagguggacaucagcgucguggugcaggaccccaagaacgucuaccagcgcggcacccaccccuucucccggauccgcgacgggcugcaguacggcuggaagaccugggggaagaaccugguguucagccccggccggaagaacggcuccuucaucaucgacggcaagagccgcaaggagugcccguucuccaaccggguguggaacagcuuccagaucgaggaguucgggacgggggucuucaccacccgcguguacauggacgccguguucgaguacaccaucgacugcgacggcuccauccucggcgcggccgucaacgggaagaaguccgcccacggcagccccacguucuggauggggagccacgaggugaacggcaccuggaugauccacacccuggaggcccuggacuacaaggagugcgaguggccccucacccacacgaucgggaccagcguggaggaguccgagauguucaugccccggagcaucggcggcccggucuccagccacaaccacauccccggguacaaggugcagaccaacggccccuggaugcaggucccccuggaggugaagcgcgaggcgugcccggggaccuccgugaucaucgacggcaacugcgacgggcggggcaagagcacgcgcuccaccaccgacagcggcaaggugauccccgaguggugcugccgguccugcaccaugccgcccgucagcuuccacggguccgacggcugcugguaccccauggagauccgcccccggaagacgcacgagagccaccuggugcgcuccugggucaccgccggggagauccacgccgugcccuucggccucgugagcaugaugaucgccauggaggucgugcugcggaagcgccaggggcccaagcagaugcuggugggcggcgucgugcuccugggggccaugcuggugggccaggucaccugaggacuaguggaagcauuuuccuggcugauuaaaagaaauuacucagcuauggucaucuguuccuguuagaaggcuaugcagcauauuauauacuaugcgcauguuaugaaaugcauaauaaaaaauuuuaaaaaaucuaaaagaucuaaaaaaaaaaaaaaaaaaaaaaaaaaaaaaaaaaaaaaaaaaaaaaaaaaaaaaaaaaaaaaaaugcaucccccccccccccccccccccccccccccccaaaggcucuuuucagagccaccagaauu

SEQ ID NO: 2370 - RNA, 1571 nt, Artificial Sequence
  mRNA product Design d-5 comprising derived and/or modified sequence from YFV__NC_002031.1__eSS-NS1 (polyprotein: aa758-1130) (opt1)
gggagagggcgcuuggcuugcaaggacccugagcugcggcauugaagcacacccaacccaacucgacugaagucagccucacugaaccggaucugagaaucuucucucucugggcuugccagggcucuccgaaccuagcuagcauccucuucaauuccaacuagaaagcuuaccaugagcauguccaugauccuggugggcgucaucaugauguuccucagccugggggugggcgccgaccaggggugcgccaucaacuucggcaagcgcgagcugaagugcggggacggcaucuucaucuuccgggacuccgacgacuggcucaacaaguacagcuacuaccccgaggacccggugaagcuggcguccaucgucaaggccagcuucgaggagggcaagugcgggcugaacuccguggacagccucgagcacgagauguggcgcucccgggccgacgagaucaacgccaucuucgaggagaacgagguggacaucagcgucguggugcaggaccccaagaacgucuaccagcgcggcacccaccccuucucccggauccgcgacgggcugcaguacggcuggaagaccugggggaagaaccugguguucagccccggccggaagaacggcuccuucaucaucgacggcaagagccgcaaggagugcccguucuccaaccggguguggaacagcuuccagaucgaggaguucgggacgggggucuucaccacccgcguguacauggacgccguguucgaguacaccaucgacugcgacggcuccauccucggcgcggccgucaacgggaagaaguccgcccacggcagccccacguucuggauggggagccacgaggugaacggcaccuggaugauccacacccuggaggcccuggacuacaaggagugcgaguggccccucacccacacgaucgggaccagcguggaggaguccgagauguucaugccccggagcaucggcggcccggucuccagccacaaccacauccccggguacaaggugcagaccaacggccccuggaugcaggucccccuggaggugaagcgcgaggcgugcccggggaccuccgugaucaucgacggcaacugcgacgggcggggcaagagcacgcgcuccaccaccgacagcggcaaggugauccccgaguggugcugccgguccugcaccaugccgcccgucagcuuccacggguccgacggcugcugguaccccauggagauccgcccccggaagacgcacgagagccaccuggugcgcuccugggucaccgccugaggacuaguggaagcauuuuccuggcugauuaaaagaaauuacucagcuauggucaucuguuccuguuagaaggcuaugcagcauauuauauacuaugcgcauguuaugaaaugcauaauaaaaaauuuuaaaaaaucuaaaagaucuaaaaaaaaaaaaaaaaaaaaaaaaaaaaaaaaaaaaaaaaaaaaaaaaaaaaaaaaaaaaaaaaugcaucccccccccccccccccccccccccccccccaaaggcucuuuucagagccaccagaauu

SEQ ID NO: 2371 - RNA, 1562 nt, Artificial Sequence
  mRNA product Design d-5 comprising derived and/or modified sequence from YFV__NC_002031.1__SSIgE-NS1 (polyprotein: aa779-1130) (opt1)
gggagagggcgcuuggcuugcaaggacccugagcugcggcauugaagcacacccaacccaacucgacugaagucagccucacugaaccggaucugagaaucuucucucucugggcuugccagggcucuccgaaccuagcuagcauccucuucaauuccaacuagaaagcuuaccauggacuggaccuggauccuguuccucguggccgccgcgacccgcguccacagcgaccaggggugcgccaucaacuucggcaagcgcgagcugaagugcggggacggcaucuucaucuuccgggacuccgacgacuggcucaacaaguacagcuacuaccccgaggacccggugaagcuggcguccaucgucaaggccagcuucgaggagggcaagugcgggcugaacuccguggacagccucgagcacgagauguggcgcucccgggccgacgagaucaacgccaucuucgaggagaacgagguggacaucagcgucguggugcaggaccccaagaacgucuaccagcgcggcacccaccccuucucccggauccgcgacgggcugcaguacggcuggaagaccugggggaagaaccugguguucagccccggccggaagaacggcuccuucaucaucgacggcaagagccgcaaggagugcccguucuccaaccggguguggaacagcuuccagaucgaggaguucgggacgggggucuucaccacccgcguguacauggacgccguguucgaguacaccaucgacugcgacggcuccauccucggcgcggccgucaacgggaagaaguccgcccacggcagccccacguucuggauggggagccacgaggugaacggcaccuggaugauccacacccuggaggcccuggacuacaaggagugcgaguggccccucacccacacgaucgggaccagcguggaggaguccgagauguucaugccccggagcaucggcggcccggucuccagccacaaccacauccccggguacaaggugcagaccaacggccccuggaugcaggucccccuggaggugaagcgcgaggcgugcccggggaccuccgugaucaucgacggcaacugcgacgggcggggcaagagcacgcgcuccaccaccgacagcggcaaggugauccccgaguggugcugccgguccugcaccaugccgcccgucagcuuccacggguccgacggcugcugguaccccauggagauccgcccccggaagacgcacgagagccaccuggugcgcuccugggucaccgccugaggacuaguggaagcauuuuccuggcugauuaaaagaaauuacucagcuauggucaucuguuccuguuagaaggcuaugcagcauauuauauacuaugcgcauguuaugaaaugcauaauaaaaaauuuuaaaaaaucuaaaagaucuaaaaaaaaaaaaaaaaaaaaaaaaaaaaaaaaaaaaaaaaaaaaaaaaaaaaaaaaaaaaaaaaugcaucccccccccccccccccccccccccccccccaaaggcucuuuucagagccaccagaauu

SEQ ID NO: 2372 - RNA, 1712 nt, Artificial Sequence
  mRNA product Design d-5 comprising derived and/or modified sequence from YFV__NC_002031.1__eSS-NS1-Y (polyprotein: aa758-1177) (opt2)
gggagagggcgcuuggcuugcaaggacccugagcugcggcauugaagcacacccaacccaacucgacugaagucagccucacugaaccggaucugagaaucuucucucucugggcuugccagggcucuccgaaccuagcuagcauccucuucaauuccaacuagaaagcuuaccauguccauguccaugauccucgucggcgucaucaugauguuccucucccucggcgucggcgccgaccagggcugcgccaucaacuucggcaagcgcgagcucaagugcggcgacggcaucuucaucuuccgcgacuccgacgacuggcucaacaaguacuccuacuaccccgaggaccccgucaagcucgccuccaucgucaaggccuccuucgaggagggcaagugcggccucaacuccgucgacucccucgagcacgagauguggcgcucccgcgccgacgagaucaacgccaucuucgaggagaacgaggucgacaucuccgucgucguccaggaccccaagaacgucuaccagcgcggcacccaccccuucucccgcauccgcgacggccuccaguacggcuggaagaccuggggcaagaaccucgucuucucccccggccgcaagaacggcuccuucaucaucgacggcaagucccgcaaggagugccccuucuccaaccgcgucuggaacuccuuccagaucgaggaguucggcaccggcgucuucaccacccgcgucuacauggacgccgucuucgaguacaccaucgacugcgacggcuccauccucggcgccgccgucaacggcaagaaguccgcccacggcucccccaccuucuggaugggcucccacgaggucaacggcaccuggaugauccacacccucgaggcccucgacuacaaggagugcgaguggccccucacccacaccaucggcaccuccgucgaggaguccgagauguucaugccccgcuccaucggcggccccgucuccucccacaaccacauccccggcuacaagguccagaccaacggccccuggaugcaggucccccucgaggucaagcgcgaggccugccccggcaccuccgucaucaucgacggcaacugcgacggccgcggcaaguccacccgcuccaccaccgacuccggcaaggucauccccgaguggugcugccgcuccugcaccaugccccccgucuccuuccacggcuccgacggcugcugguaccccauggagauccgcccccgcaagacccacgagucccaccucguccgcuccugggucaccgccggcgagauccacgccguccccuucggccucgucuccaugaugaucgccauggaggucguccuccgcaagcgccagggccccaagcagaugcucgucggcggcgucguccuccucggcgccaugcucgucggccaggucaccugaggacuaguggaagcauuuuccuggcugauuaaaagaaauuacucagcuauggucaucuguuccuguuagaaggcuaugcagcauauuauauacuaugcgcauguuaugaaaugcauaauaaaaaauuuuaaaaaaucuaaaagaucuaaaaaaaaaaaaaaaaaaaaaaaaaaaaaaaaaaaaaaaaaaaaaaaaaaaaaaaaaaaaaaaaugcaucccccccccccccccccccccccccccccccaaaggcucuuuucagagccaccagaauu

SEQ ID NO: 2373 - RNA, 1571 nt, Artificial Sequence
  mRNA product Design d-5 comprising derived and/or modified sequence from YFV__NC_002031.1__eSS-NS1 (polyprotein: aa758-1130) (opt2)
gggagagggcgcuuggcuugcaaggacccugagcugcggcauugaagcacacccaacccaacucgacugaagucagccucacugaaccggaucugagaaucuucucucucugggcuugccagggcucuccgaaccuagcuagcauccucuucaauuccaacuagaaagcuuaccauguccauguccaugauccucgucggcgucaucaugauguuccucucccucggcgucggcgccgaccagggcugcgccaucaacuucggcaagcgcgagcucaagugcggcgacggcaucuucaucuuccgcgacuccgacgacuggcucaacaaguacuccuacuaccccgaggaccccgucaagcucgccuccaucgucaaggccuccuucgaggagggcaagugcggccucaacuccgucgacucccucgagcacgagauguggcgcucccgcgccgacgagaucaacgccaucuucgaggagaacgaggucgacaucuccgucgucguccaggaccccaagaacgucuaccagcgcggcacccaccccuucucccgcauccgcgacggccuccaguacggcuggaagaccuggggcaagaaccucgucuucucccccggccgcaagaacggcuccuucaucaucgacggcaagucccgcaaggagugccccuucuccaaccgcgucuggaacuccuuccagaucgaggaguucggcaccggcgucuucaccacccgcgucuacauggacgccgucuucgaguacaccaucgacugcgacggcuccauccucggcgccgccgucaacggcaagaaguccgcccacggcucccccaccuucuggaugggcucccacgaggucaacggcaccuggaugauccacacccucgaggcccucgacuacaaggagugcgaguggccccucacccacaccaucggcaccuccgucgaggaguccgagauguucaugccccgcuccaucggcggccccgucuccucccacaaccacauccccggcuacaagguccagaccaacggccccuggaugcaggucccccucgaggucaagcgcgaggccugccccggcaccuccgucaucaucgacggcaacugcgacggccgcggcaaguccacccgcuccaccaccgacuccggcaaggucauccccgaguggugcugccgcuccugcaccaugccccccgucuccuuccacggcuccgacggcugcugguaccccauggagauccgcccccgcaagacccacgagucccaccucguccgcuccugggucaccgccugaggacuaguggaagcauuuuccuggcugauuaaaagaaauuacucagcuauggucaucuguuccuguuagaaggcuaugcagcauauuauauacuaugcgcauguuaugaaaugcauaauaaaaaauuuuaaaaaaucuaaaagaucuaaaaaaaaaaaaaaaaaaaaaaaaaaaaaaaaaaaaaaaaaaaaaaaaaaaaaaaaaaaaaaaaugcaucccccccccccccccccccccccccccccccaaaggcucuuuucagagccaccagaauu

SEQ ID NO: 2374 - RNA, 1562 nt, Artificial Sequence
  mRNA product Design d-5 comprising derived and/or modified sequence from YFV__NC_002031.1__SSIgE-NS1 (polyprotein: aa779-1130) (opt2)
gggagagggcgcuuggcuugcaaggacccugagcugcggcauugaagcacacccaacccaacucgacugaagucagccucacugaaccggaucugagaaucuucucucucugggcuugccagggcucuccgaaccuagcuagcauccucuucaauuccaacuagaaagcuuaccauggacuggaccuggauccucuuccucgucgccgccgccacccgcguccacuccgaccagggcugcgccaucaacuucggcaagcgcgagcucaagugcggcgacggcaucuucaucuuccgcgacuccgacgacuggcucaacaaguacuccuacuaccccgaggaccccgucaagcucgccuccaucgucaaggccuccuucgaggagggcaagugcggccucaacuccgucgacucccucgagcacgagauguggcgcucccgcgccgacgagaucaacgccaucuucgaggagaacgaggucgacaucuccgucgucguccaggaccccaagaacgucuaccagcgcggcacccaccccuucucccgcauccgcgacggccuccaguacggcuggaagaccuggggcaagaaccucgucuucucccccggccgcaagaacggcuccuucaucaucgacggcaagucccgcaaggagugccccuucuccaaccgcgucuggaacuccuuccagaucgaggaguucggcaccggcgucuucaccacccgcgucuacauggacgccgucuucgaguacaccaucgacugcgacggcuccauccucggcgccgccgucaacggcaagaaguccgcccacggcucccccaccuucuggaugggcucccacgaggucaacggcaccuggaugauccacacccucgaggcccucgacuacaaggagugcgaguggccccucacccacaccaucggcaccuccgucgaggaguccgagauguucaugccccgcuccaucggcggccccgucuccucccacaaccacauccccggcuacaagguccagaccaacggccccuggaugcaggucccccucgaggucaagcgcgaggccugccccggcaccuccgucaucaucgacggcaacugcgacggccgcggcaaguccacccgcuccaccaccgacuccggcaaggucauccccgaguggugcugccgcuccugcaccaugccccccgucuccuuccacggcuccgacggcugcugguaccccauggagauccgcccccgcaagacccacgagucccaccucguccgcuccugggucaccgccugaggacuaguggaagcauuuuccuggcugauuaaaagaaauuacucagcuauggucaucuguuccuguuagaaggcuaugcagcauauuauauacuaugcgcauguuaugaaaugcauaauaaaaaauuuuaaaaaaucuaaaagaucuaaaaaaaaaaaaaaaaaaaaaaaaaaaaaaaaaaaaaaaaaaaaaaaaaaaaaaaaaaaaaaaaugcaucccccccccccccccccccccccccccccccaaaggcucuuuucagagccaccagaauu

SEQ ID NO: 2375 - RNA, 1712 nt, Artificial Sequence
  mRNA product Design d-5 comprising derived and/or modified sequence from YFV__NC_002031.1__eSS-NS1-Y (polyprotein: aa758-1177) (opt3)
gggagagggcgcuuggcuugcaaggacccugagcugcggcauugaagcacacccaacccaacucgacugaagucagccucacugaaccggaucugagaaucuucucucucugggcuugccagggcucuccgaaccuagcuagcauccucuucaauuccaacuagaaagcuuaccaugagcauguccaugauccuggugggcgucauuaugauguuccucucucuugggguuggagccgaccaggguugcgcuauaaacuuuggcaagagagagcugaaauguggggauggaaucuucauuuuuagggacucagaugacugguugaauaaguacaguuauuaccccgaagauccugugaaauuagcaagcaucguaaaggccuccuucgaggaaggcaaaugcggucugaacucuguggacucgcuagagcacgaaauguggcggucacgcgcggaugagauuaaugcuaucuuugaggaaaacgaggucgacauaagcgugguugugcaagauccaaagaaugucuaucagcgagggacccauccguucagucguaucagagacggacuccaguacggcuggaagacauggggcaaaaaccugguguuuucccccgggaggaagaauggaucuuucauuaucgaugguaaaagccggaaggaauguccuuuuuccaaccgcguauggaacucauuccagauugaggaguuuggcacugggguuuucacgaccagaguguauauggacgccgucuuugaauacacaaucgauugcgacggaaguauacuuggcgcagccgugaaugguaaaaagagcgcucacgggucuccaacuuucuggaugggaucccaugaggugaauggcaccuggaugauucacacacuggaagcauuggacuauaaggagugugaauggccccucacccauacuaucggcacaucagucgaggagagcgaaauguucaugccuaggaguauugggggaccaguuucuucccacaaccacauccccgguuacaaagugcaaaccaauggcccuuggaugcagguaccacuggaggugaagcgggaagccugcccggggacgagcgucaucauugauggaaacugugacggccgcgguaaaucgacucgaucuaccacagauuccgggaaggugauacccgaguggugcuguagaucaugcacuaugccuccaguuaguuuucauggcagcgacggauguugguaccccauggaaaucaggccucggaaaacccacgagucccaucuggugcguucuugggucacagcuggcgagauucacgccgugccauucgggcucguaagcaugaugaucgcgauggaaguuguguuacgcaagagacagggacccaaacagaugcuggucgguggcgugguccuuuugggggcaaugcuggugggacaaguuaccugaggacuaguggaagcauuuuccuggcugauuaaaagaaauuacucagcuauggucaucuguuccuguuagaaggcuaugcagcauauuauauacuaugcgcauguuaugaaaugcauaauaaaaaauuuuaaaaaaucuaaaagaucuaaaaaaaaaaaaaaaaaaaaaaaaaaaaaaaaaaaaaaaaaaaaaaaaaaaaaaaaaaaaaaaaugcaucccccccccccccccccccccccccccccccaaaggcucuuuucagagccaccagaauu

SEQ ID NO: 2376 - RNA, 1571 nt, Artificial Sequence
  mRNA product Design d-5 comprising derived and/or modified sequence from YFV__NC_002031.1__eSS-NS1 (polyprotein: aa758-1130) (opt3)
gggagagggcgcuuggcuugcaaggacccugagcugcggcauugaagcacacccaacccaacucgacugaagucagccucacugaaccggaucugagaaucuucucucucugggcuugccagggcucuccgaaccuagcuagcauccucuucaauuccaacuagaaagcuuaccaugagcauguccaugauccuggugggcgucauuaugauguuccucucucuugggguuggagccgaccaggguugcgcuauaaacuuuggcaagagagagcugaaauguggggauggaaucuucauuuuuagggacucagaugacugguugaauaaguacaguuauuaccccgaagauccugugaaauuagcaagcaucguaaaggccuccuucgaggaaggcaaaugcggucugaacucuguggacucgcuagagcacgaaauguggcggucacgcgcggaugagauuaaugcuaucuuugaggaaaacgaggucgacauaagcgugguugugcaagauccaaagaaugucuaucagcgagggacccauccguucagucguaucagagacggacuccaguacggcuggaagacauggggcaaaaaccugguguuuucccccgggaggaagaauggaucuuucauuaucgaugguaaaagccggaaggaauguccuuuuuccaaccgcguauggaacucauuccagauugaggaguuuggcacugggguuuucacgaccagaguguauauggacgccgucuuugaauacacaaucgauugcgacggaaguauacuuggcgcagccgugaaugguaaaaagagcgcucacgggucuccaacuuucuggaugggaucccaugaggugaauggcaccuggaugauucacacacuggaagcauuggacuauaaggagugugaauggccccucacccauacuaucggcacaucagucgaggagagcgaaauguucaugccuaggaguauugggggaccaguuucuucccacaaccacauccccgguuacaaagugcaaaccaauggcccuuggaugcagguaccacuggaggugaagcgggaagccugcccggggacgagcgucaucauugauggaaacugugacggccgcgguaaaucgacucgaucuaccacagauuccgggaaggugauacccgaguggugcuguagaucaugcacuaugccuccaguuaguuuucauggcagcgacggauguugguaccccauggaaaucaggccucggaaaacccacgagucccaucuggugcguucuugggucacagcuugaggacuaguggaagcauuuuccuggcugauuaaaagaaauuacucagcuauggucaucuguuccuguuagaaggcuaugcagcauauuauauacuaugcgcauguuaugaaaugcauaauaaaaaauuuuaaaaaaucuaaaagaucuaaaaaaaaaaaaaaaaaaaaaaaaaaaaaaaaaaaaaaaaaaaaaaaaaaaaaaaaaaaaaaaaugcaucccccccccccccccccccccccccccccccaaaggcucuuuucagagccaccagaauu

SEQ ID NO: 2377 - RNA, 1562 nt, Artificial Sequence
  mRNA product Design d-5 comprising derived and/or modified sequence from YFV__NC_002031.1__SSIgE-NS1 (polyprotein: aa779-1130) (opt3)
gggagagggcgcuuggcuugcaaggacccugagcugcggcauugaagcacacccaacccaacucgacugaagucagccucacugaaccggaucugagaaucuucucucucugggcuugccagggcucuccgaaccuagcuagcauccucuucaauuccaacuagaaagcuuaccauggacuggaccuggauccuguuccucguggccgcugcaacaagaguccacagcgaccaggguugcgcuauaaacuuuggcaagagagagcugaaauguggggauggaaucuucauuuuuagggacucagaugacugguugaauaaguacaguuauuaccccgaagauccugugaaauuagcaagcaucguaaaggccuccuucgaggaaggcaaaugcggucugaacucuguggacucgcuagagcacgaaauguggcggucacgcgcggaugagauuaaugcuaucuuugaggaaaacgaggucgacauaagcgugguugugcaagauccaaagaaugucuaucagcgagggacccauccguucagucguaucagagacggacuccaguacggcuggaagacauggggcaaaaaccugguguuuucccccgggaggaagaauggaucuuucauuaucgaugguaaaagccggaaggaauguccuuuuuccaaccgcguauggaacucauuccagauugaggaguuuggcacugggguuuucacgaccagaguguauauggacgccgucuuugaauacacaaucgauugcgacggaaguauacuuggcgcagccgugaaugguaaaaagagcgcucacgggucuccaacuuucuggaugggaucccaugaggugaauggcaccuggaugauucacacacuggaagcauuggacuauaaggagugugaauggccccucacccauacuaucggcacaucagucgaggagagcgaaauguucaugccuaggaguauugggggaccaguuucuucccacaaccacauccccgguuacaaagugcaaaccaauggcccuuggaugcagguaccacuggaggugaagcgggaagccugcccggggacgagcgucaucauugauggaaacugugacggccgcgguaaaucgacucgaucuaccacagauuccgggaaggugauacccgaguggugcuguagaucaugcacuaugccuccaguuaguuuucauggcagcgacggauguugguaccccauggaaaucaggccucggaaaacccacgagucccaucuggugcguucuugggucacagcuugaggacuaguggaagcauuuuccuggcugauuaaaagaaauuacucagcuauggucaucuguuccuguuagaaggcuaugcagcauauuauauacuaugcgcauguuaugaaaugcauaauaaaaaauuuuaaaaaaucuaaaagaucuaaaaaaaaaaaaaaaaaaaaaaaaaaaaaaaaaaaaaaaaaaaaaaaaaaaaaaaaaaaaaaaaugcaucccccccccccccccccccccccccccccccaaaggcucuuuucagagccaccagaauu

SEQ ID NO: 2378 - RNA, 1712 nt, Artificial Sequence
  mRNA product Design d-5 comprising derived and/or modified sequence from YFV__NC_002031.1__eSS-NS1-Y (polyprotein: aa758-1177) (opt4)
gggagagggcgcuuggcuugcaaggacccugagcugcggcauugaagcacacccaacccaacucgacugaagucagccucacugaaccggaucugagaaucuucucucucugggcuugccagggcucuccgaaccuagcuagcauccucuucaauuccaacuagaaagcuuaccaugagcaugagcaugauccuggugggcgugaucaugauguuccugagccugggcgugggcgccgaccagggcugcgccaucaacuucggcaagagagagcugaagugcggcgacggcaucuucaucuucagagacagcgacgacuggcugaacaaguacagcuacuaccccgaggaccccgugaagcuggccagcaucgugaaggccagcuucgaggagggcaagugcggccugaacagcguggacagccuggagcacgagauguggagaagcagagccgacgagaucaacgccaucuucgaggagaacgagguggacaucagcgugguggugcaggaccccaagaacguguaccagagaggcacccaccccuucagcagaaucagagacggccugcaguacggcuggaagaccuggggcaagaaccugguguucagccccggcagaaagaacggcagcuucaucaucgacggcaagagcagaaaggagugccccuucagcaacagaguguggaacagcuuccagaucgaggaguucggcaccggcguguucaccaccagaguguacauggacgccguguucgaguacaccaucgacugcgacggcagcauccugggcgccgccgugaacggcaagaagagcgcccacggcagccccaccuucuggaugggcagccacgaggugaacggcaccuggaugauccacacccuggaggcccuggacuacaaggagugcgaguggccccugacccacaccaucggcaccagcguggaggagagcgagauguucaugcccagaagcaucggcggccccgugagcagccacaaccacauccccggcuacaaggugcagaccaacggccccuggaugcaggugccccuggaggugaagagagaggccugccccggcaccagcgugaucaucgacggcaacugcgacggcagaggcaagagcaccagaagcaccaccgacagcggcaaggugauccccgaguggugcugcagaagcugcaccaugccccccgugagcuuccacggcagcgacggcugcugguaccccauggagaucagacccagaaagacccacgagagccaccuggugagaagcugggugaccgccggcgagauccacgccgugcccuucggccuggugagcaugaugaucgccauggagguggugcugagaaagagacagggccccaagcagaugcuggugggcggcguggugcugcugggcgccaugcuggugggccaggugaccugaggacuaguggaagcauuuuccuggcugauuaaaagaaauuacucagcuauggucaucuguuccuguuagaaggcuaugcagcauauuauauacuaugcgcauguuaugaaaugcauaauaaaaaauuuuaaaaaaucuaaaagaucuaaaaaaaaaaaaaaaaaaaaaaaaaaaaaaaaaaaaaaaaaaaaaaaaaaaaaaaaaaaaaaaaugcaucccccccccccccccccccccccccccccccaaaggcucuuuucagagccaccagaauu

SEQ ID NO: 2379 - RNA, 1571 nt, Artificial Sequence
  mRNA product Design d-5 comprising derived and/or modified sequence from YFV__NC_002031.1__eSS-NS1 (polyprotein: aa758-1130) (opt4)
gggagagggcgcuuggcuugcaaggacccugagcugcggcauugaagcacacccaacccaacucgacugaagucagccucacugaaccggaucugagaaucuucucucucugggcuugccagggcucuccgaaccuagcuagcauccucuucaauuccaacuagaaagcuuaccaugagcaugagcaugauccuggugggcgugaucaugauguuccugagccugggcgugggcgccgaccagggcugcgccaucaacuucggcaagagagagcugaagugcggcgacggcaucuucaucuucagagacagcgacgacuggcugaacaaguacagcuacuaccccgaggaccccgugaagcuggccagcaucgugaaggccagcuucgaggagggcaagugcggccugaacagcguggacagccuggagcacgagauguggagaagcagagccgacgagaucaacgccaucuucgaggagaacgagguggacaucagcgugguggugcaggaccccaagaacguguaccagagaggcacccaccccuucagcagaaucagagacggccugcaguacggcuggaagaccuggggcaagaaccugguguucagccccggcagaaagaacggcagcuucaucaucgacggcaagagcagaaaggagugccccuucagcaacagaguguggaacagcuuccagaucgaggaguucggcaccggcguguucaccaccagaguguacauggacgccguguucgaguacaccaucgacugcgacggcagcauccugggcgccgccgugaacggcaagaagagcgcccacggcagccccaccuucuggaugggcagccacgaggugaacggcaccuggaugauccacacccuggaggcccuggacuacaaggagugcgaguggccccugacccacaccaucggcaccagcguggaggagagcgagauguucaugcccagaagcaucggcggccccgugagcagccacaaccacauccccggcuacaaggugcagaccaacggccccuggaugcaggugccccuggaggugaagagagaggccugccccggcaccagcgugaucaucgacggcaacugcgacggcagaggcaagagcaccagaagcaccaccgacagcggcaaggugauccccgaguggugcugcagaagcugcaccaugccccccgugagcuuccacggcagcgacggcugcugguaccccauggagaucagacccagaaagacccacgagagccaccuggugagaagcugggugaccgccugaggacuaguggaagcauuuuccuggcugauuaaaagaaauuacucagcuauggucaucuguuccuguuagaaggcuaugcagcauauuauauacuaugcgcauguuaugaaaugcauaauaaaaaauuuuaaaaaaucuaaaagaucuaaaaaaaaaaaaaaaaaaaaaaaaaaaaaaaaaaaaaaaaaaaaaaaaaaaaaaaaaaaaaaaaugcaucccccccccccccccccccccccccccccccaaaggcucuuuucagagccaccagaauu

SEQ ID NO: 2380 - RNA, 1562 nt, Artificial Sequence
  mRNA product Design d-5 comprising derived and/or modified sequence from YFV__NC_002031.1__SSIgE-NS1 (polyprotein: aa779-1130) (opt4)
gggagagggcgcuuggcuugcaaggacccugagcugcggcauugaagcacacccaacccaacucgacugaagucagccucacugaaccggaucugagaaucuucucucucugggcuugccagggcucuccgaaccuagcuagcauccucuucaauuccaacuagaaagcuuaccauggacuggaccuggauccuguuccugguggccgccgccaccagagugcacagcgaccagggcugcgccaucaacuucggcaagagagagcugaagugcggcgacggcaucuucaucuucagagacagcgacgacuggcugaacaaguacagcuacuaccccgaggaccccgugaagcuggccagcaucgugaaggccagcuucgaggagggcaagugcggccugaacagcguggacagccuggagcacgagauguggagaagcagagccgacgagaucaacgccaucuucgaggagaacgagguggacaucagcgugguggugcaggaccccaagaacguguaccagagaggcacccaccccuucagcagaaucagagacggccugcaguacggcuggaagaccuggggcaagaaccugguguucagccccggcagaaagaacggcagcuucaucaucgacggcaagagcagaaaggagugccccuucagcaacagaguguggaacagcuuccagaucgaggaguucggcaccggcguguucaccaccagaguguacauggacgccguguucgaguacaccaucgacugcgacggcagcauccugggcgccgccgugaacggcaagaagagcgcccacggcagccccaccuucuggaugggcagccacgaggugaacggcaccuggaugauccacacccuggaggcccuggacuacaaggagugcgaguggccccugacccacaccaucggcaccagcguggaggagagcgagauguucaugcccagaagcaucggcggccccgugagcagccacaaccacauccccggcuacaaggugcagaccaacggccccuggaugcaggugccccuggaggugaagagagaggccugccccggcaccagcgugaucaucgacggcaacugcgacggcagaggcaagagcaccagaagcaccaccgacagcggcaaggugauccccgaguggugcugcagaagcugcaccaugccccccgugagcuuccacggcagcgacggcugcugguaccccauggagaucagacccagaaagacccacgagagccaccuggugagaagcugggugaccgccugaggacuaguggaagcauuuuccuggcugauuaaaagaaauuacucagcuauggucaucuguuccuguuagaaggcuaugcagcauauuauauacuaugcgcauguuaugaaaugcauaauaaaaaauuuuaaaaaaucuaaaagaucuaaaaaaaaaaaaaaaaaaaaaaaaaaaaaaaaaaaaaaaaaaaaaaaaaaaaaaaaaaaaaaaaugcaucccccccccccccccccccccccccccccccaaaggcucuuuucagagccaccagaauu

SEQ ID NO: 2381 - RNA, 1712 nt, Artificial Sequence
  mRNA product Design d-5 comprising derived and/or modified sequence from YFV__NC_002031.1__eSS-NS1-Y (polyprotein: aa758-1177) (opt5)
gggagagggcgcuuggcuugcaaggacccugagcugcggcauugaagcacacccaacccaacucgacugaagucagccucacugaaccggaucugagaaucuucucucucugggcuugccagggcucuccgaaccuagcuagcauccucuucaauuccaacuagaaagcuuaccaugagcauguccaugauccuggugggcgucauuaugauguuccucucucuggggguuggagccgaccagggcugcgcuaucaacuuugggaagagagagcuuaaauguggagauggcauuuucaucuuucgggacagcgaugacuggcugaauaaguacuccuauuaccccgaagauccugugaaacucgccucuauugugaaggcgagcuucgaggaagggaaaugcggacugaacuccgucgacucucuugagcacgaaauguggcgcagcagagcugaugagaucaaugccaucuuugaggaaaacgagguggacauuuccguugugguccaagauccgaagaauguguaucagcggggcacccaucccuucagccgcaucagagacggccugcaguacggguggaagacauggggcaaaaaccucguguuuucuccuggacggaagaauggguccuucauuaucgauggaaaaagccgcaaggaaugucccuuuucuaacagaguguggaacuccuuccagauugaggaguuuggcacgggggucuucaccacacggguguauauggacgccguguuugaauacaccaucgauugcgacggaagcauucugggcgcugccgucaauggcaaaaagucugcucacggguccccuacauucuggaugggaagccaugagguuaauggcaccuggaugauccacacacuggaagcccucgacuauaaggagugugaauggccccugacccauacgaucgggaccuccguggaggagucugaaauguucaugccucgcagcauuggaggcccgguguccagccacaaccacauccccggguacaaaguccaaacaaauggaccuuggaugcagguuccccuugagguuaagagagaagcgugcccuggcaccucugugauuaucgauggcaacugugacgggcggggaaaauccacacgcagcaccacggauucuggcaaggucauucccgaguggugcuguagaagcugcacaaugccgccuguguccuuucaugggucugacggauguugguaccccauggaaauccggccucgcaaaacccacgagagccaucugguuagauccugggugacagccggcgagauccacgcuguccccuucgggcucgugagcaugaugauugccauggaagucgugcugcggaagagacagggccccaaacagaugcuuguuggaggcgugguccugcucggggcuaugcuggugggacaaguuaccugaggacuaguggaagcauuuuccuggcugauuaaaagaaauuacucagcuauggucaucuguuccuguuagaaggcuaugcagcauauuauauacuaugcgcauguuaugaaaugcauaauaaaaaauuuuaaaaaaucuaaaagaucuaaaaaaaaaaaaaaaaaaaaaaaaaaaaaaaaaaaaaaaaaaaaaaaaaaaaaaaaaaaaaaaaugcaucccccccccccccccccccccccccccccccaaaggcucuuuucagagccaccagaauu

SEQ ID NO: 2382 - RNA, 1571 nt, Artificial Sequence
  mRNA product Design d-5 comprising derived and/or modified sequence from YFV__NC_002031.1__eSS-NS1 (polyprotein: aa758-1130) (opt5)
gggagagggcgcuuggcuugcaaggacccugagcugcggcauugaagcacacccaacccaacucgacugaagucagccucacugaaccggaucugagaaucuucucucucugggcuugccagggcucuccgaaccuagcuagcauccucuucaauuccaacuagaaagcuuaccaugagcauguccaugauccuggugggcgucauuaugauguuccucucucuggggguuggagccgaccagggcugcgcuaucaacuuugggaagagagagcuuaaauguggagauggcauuuucaucuuucgggacagcgaugacuggcugaauaaguacuccuauuaccccgaagauccugugaaacucgccucuauugugaaggcgagcuucgaggaagggaaaugcggacugaacuccgucgacucucuugagcacgaaauguggcgcagcagagcugaugagaucaaugccaucuuugaggaaaacgagguggacauuuccguugugguccaagauccgaagaauguguaucagcggggcacccaucccuucagccgcaucagagacggccugcaguacggguggaagacauggggcaaaaaccucguguuuucuccuggacggaagaauggguccuucauuaucgauggaaaaagccgcaaggaaugucccuuuucuaacagaguguggaacuccuuccagauugaggaguuuggcacgggggucuucaccacacggguguauauggacgccguguuugaauacaccaucgauugcgacggaagcauucugggcgcugccgucaauggcaaaaagucugcucacggguccccuacauucuggaugggaagccaugagguuaauggcaccuggaugauccacacacuggaagcccucgacuauaaggagugugaauggccccugacccauacgaucgggaccuccguggaggagucugaaauguucaugccucgcagcauuggaggcccgguguccagccacaaccacauccccggguacaaaguccaaacaaauggaccuuggaugcagguuccccuugagguuaagagagaagcgugcccuggcaccucugugauuaucgauggcaacugugacgggcggggaaaauccacacgcagcaccacggauucuggcaaggucauucccgaguggugcuguagaagcugcacaaugccgccuguguccuuucaugggucugacggauguugguaccccauggaaauccggccucgcaaaacccacgagagccaucugguuagauccugggugacagccugaggacuaguggaagcauuuuccuggcugauuaaaagaaauuacucagcuauggucaucuguuccuguuagaaggcuaugcagcauauuauauacuaugcgcauguuaugaaaugcauaauaaaaaauuuuaaaaaaucuaaaagaucuaaaaaaaaaaaaaaaaaaaaaaaaaaaaaaaaaaaaaaaaaaaaaaaaaaaaaaaaaaaaaaaaugcaucccccccccccccccccccccccccccccccaaaggcucuuuucagagccaccagaauu

SEQ ID NO: 2383 - RNA, 1562 nt, Artificial Sequence
  mRNA product Design d-5 comprising derived and/or modified sequence from YFV__NC_002031.1__SSIgE-NS1 (polyprotein: aa779-1130) (opt5)
gggagagggcgcuuggcuugcaaggacccugagcugcggcauugaagcacacccaacccaacucgacugaagucagccucacugaaccggaucugagaaucuucucucucugggcuugccagggcucuccgaaccuagcuagcauccucuucaauuccaacuagaaagcuuaccauggacuggaccuggauccuguuccucguggccgcugccacaagaguccacagcgaccagggcugcgcuaucaacuuugggaagagagagcuuaaauguggagauggcauuuucaucuuucgggacagcgaugacuggcugaauaaguacuccuauuaccccgaagauccugugaaacucgccucuauugugaaggcgagcuucgaggaagggaaaugcggacugaacuccgucgacucucuugagcacgaaauguggcgcagcagagcugaugagaucaaugccaucuuugaggaaaacgagguggacauuuccguugugguccaagauccgaagaauguguaucagcggggcacccaucccuucagccgcaucagagacggccugcaguacggguggaagacauggggcaaaaaccucguguuuucuccuggacggaagaauggguccuucauuaucgauggaaaaagccgcaaggaaugucccuuuucuaacagaguguggaacuccuuccagauugaggaguuuggcacgggggucuucaccacacggguguauauggacgccguguuugaauacaccaucgauugcgacggaagcauucugggcgcugccgucaauggcaaaaagucugcucacggguccccuacauucuggaugggaagccaugagguuaauggcaccuggaugauccacacacuggaagcccucgacuauaaggagugugaauggccccugacccauacgaucgggaccuccguggaggagucugaaauguucaugccucgcagcauuggaggcccgguguccagccacaaccacauccccggguacaaaguccaaacaaauggaccuuggaugcagguuccccuugagguuaagagagaagcgugcccuggcaccucugugauuaucgauggcaacugugacgggcggggaaaauccacacgcagcaccacggauucuggcaaggucauucccgaguggugcuguagaagcugcacaaugccgccuguguccuuucaugggucugacggauguugguaccccauggaaauccggccucgcaaaacccacgagagccaucugguuagauccugggugacagccugaggacuaguggaagcauuuuccuggcugauuaaaagaaauuacucagcuauggucaucuguuccuguuagaaggcuaugcagcauauuauauacuaugcgcauguuaugaaaugcauaauaaaaaauuuuaaaaaaucuaaaagaucuaaaaaaaaaaaaaaaaaaaaaaaaaaaaaaaaaaaaaaaaaaaaaaaaaaaaaaaaaaaaaaaaugcaucccccccccccccccccccccccccccccccaaaggcucuuuucagagccaccagaauu

SEQ ID NO: 2384 - RNA, 1712 nt, Artificial Sequence
  mRNA product Design d-5 comprising derived and/or modified sequence from YFV__NC_002031.1__eSS-NS1-Y (polyprotein: aa758-1177) (opt6)
gggagagggcgcuuggcuugcaaggacccugagcugcggcauugaagcacacccaacccaacucgacugaagucagccucacugaaccggaucugagaaucuucucucucugggcuugccagggcucuccgaaccuagcuagcauccucuucaauuccaacuagaaagcuuaccaugucaaugaguaugauauuaguagggguaauaaugauguuccuuagcuuaggaguaggagcagaucaaggaugugcaauaaauuuuggaaaaagagaacuaaaaugcggagacgguauauuuauauuuagagauagugaugauuggcuaaauaaauauaguuacuauccagaagauccaguuaaauuagccucaauaguaaaagcuagcuuugaagaaggaaaauguggacuaaauucaguagacagucuagaacacgaaauguggagaucaagggcagaugaaauaaaugcaaucuuugaagaaaaugaaguggauauaucagugguaguacaagauccaaaaaauguguaccaaagaggaacacauccauuuaguaggauaagagauggauuacaauauggauggaaaacauggggaaaaaauuuaguauuuaguccaggaagaaaaaauggaucauuuauaauagaugggaaaagccgaaaagaauguccauuuucaaacagaguauggaacucauuucaaauugaagaauuuggaacaggaguauuuacaacaagaguauauauggaugcaguauuugaauacaccauagauugugauggaaguauauuaggagcagcaguaaaugggaaaaaaagcgcucacggaaguccaacguuuuggaugggaucacacgagguaaauggcacguggaugauacauacuuuagaagcauuagauuacaaagaaugugaauggccauuaacucauacaauagguacaagcguagaagaaagugagauguuuaugccacguucaaucggggggccaguaucaagucauaaccauauaccaggauauaaaguacaaacgaauggaccuuggaugcaaguaccacuagaaguaaaacgagaagcaugcccaggaacgucaguaauaauagauggaaauugugauggcagggguaaaagcacaagaucaacaacagauucaggaaaaguaauaccugaaugguguuguagaaguuguacaaugccaccaguaucauuccauggaagugauggaugcugguauccaauggaaauuagaccaagaaaaacucaugaaagucauuuaguaagaucuuggguaacugcaggagaaauacaugcaguaccauuugguuuaguaaguaugaugauagcaauggaaguaguucuaagaaaaaggcaagggccuaaacaaaugcuagugggaggaguaguauugcuaggugcaauguuaguaggccaaguaaccugaggacuaguggaagcauuuuccuggcugauuaaaagaaauuacucagcuauggucaucuguuccuguuagaaggcuaugcagcauauuauauacuaugcgcauguuaugaaaugcauaauaaaaaauuuuaaaaaaucuaaaagaucuaaaaaaaaaaaaaaaaaaaaaaaaaaaaaaaaaaaaaaaaaaaaaaaaaaaaaaaaaaaaaaaaugcaucccccccccccccccccccccccccccccccaaaggcucuuuucagagccaccagaauu

SEQ ID NO: 2385 - RNA, 1571 nt, Artificial Sequence
  mRNA product Design d-5 comprising derived and/or modified sequence from YFV__NC_002031.1__eSS-NS1 (polyprotein: aa758-1130) (opt6)
gggagagggcgcuuggcuugcaaggacccugagcugcggcauugaagcacacccaacccaacucgacugaagucagccucacugaaccggaucugagaaucuucucucucugggcuugccagggcucuccgaaccuagcuagcauccucuucaauuccaacuagaaagcuuaccaugucaaugaguaugauauuaguagggguaauaaugauguuccuuagcuuaggaguaggagcagaucaaggaugugcaauaaauuuuggaaaaagagaacuaaaaugcggagacgguauauuuauauuuagagauagugaugauuggcuaaauaaauauaguuacuauccagaagauccaguuaaauuagccucaauaguaaaagcuagcuuugaagaaggaaaauguggacuaaauucaguagacagucuagaacacgaaauguggagaucaagggcagaugaaauaaaugcaaucuuugaagaaaaugaaguggauauaucagugguaguacaagauccaaaaaauguguaccaaagaggaacacauccauuuaguaggauaagagauggauuacaauauggauggaaaacauggggaaaaaauuuaguauuuaguccaggaagaaaaaauggaucauuuauaauagaugggaaaagccgaaaagaauguccauuuucaaacagaguauggaacucauuucaaauugaagaauuuggaacaggaguauuuacaacaagaguauauauggaugcaguauuugaauacaccauagauugugauggaaguauauuaggagcagcaguaaaugggaaaaaaagcgcucacggaaguccaacguuuuggaugggaucacacgagguaaauggcacguggaugauacauacuuuagaagcauuagauuacaaagaaugugaauggccauuaacucauacaauagguacaagcguagaagaaagugagauguuuaugccacguucaaucggggggccaguaucaagucauaaccauauaccaggauauaaaguacaaacgaauggaccuuggaugcaaguaccacuagaaguaaaacgagaagcaugcccaggaacgucaguaauaauagauggaaauugugauggcagggguaaaagcacaagaucaacaacagauucaggaaaaguaauaccugaaugguguuguagaaguuguacaaugccaccaguaucauuccauggaagugauggaugcugguauccaauggaaauuagaccaagaaaaacucaugaaagucauuuaguaagaucuuggguaacugcaugaggacuaguggaagcauuuuccuggcugauuaaaagaaauuacucagcuauggucaucuguuccuguuagaaggcuaugcagcauauuauauacuaugcgcauguuaugaaaugcauaauaaaaaauuuuaaaaaaucuaaaagaucuaaaaaaaaaaaaaaaaaaaaaaaaaaaaaaaaaaaaaaaaaaaaaaaaaaaaaaaaaaaaaaaaugcaucccccccccccccccccccccccccccccccaaaggcucuuuucagagccaccagaauu

SEQ ID NO: 2386 - RNA, 1562 nt, Artificial Sequence
  mRNA product Design d-5 comprising derived and/or modified sequence from YFV__NC_002031.1__SSIgE-NS1 (polyprotein: aa779-1130) (opt6)
gggagagggcgcuuggcuugcaaggacccugagcugcggcauugaagcacacccaacccaacucgacugaagucagccucacugaaccggaucugagaaucuucucucucugggcuugccagggcucuccgaaccuagcuagcauccucuucaauuccaacuagaaagcuuaccauggacuggacauggauauuauuuuuaguagcagcagcaacaagaguacauucagaucaaggaugugcaauaaauuuuggaaaaagagaacuaaaaugcggagacgguauauuuauauuuagagauagugaugauuggcuaaauaaauauaguuacuauccagaagauccaguuaaauuagccucaauaguaaaagcuagcuuugaagaaggaaaauguggacuaaauucaguagacagucuagaacacgaaauguggagaucaagggcagaugaaauaaaugcaaucuuugaagaaaaugaaguggauauaucagugguaguacaagauccaaaaaauguguaccaaagaggaacacauccauuuaguaggauaagagauggauuacaauauggauggaaaacauggggaaaaaauuuaguauuuaguccaggaagaaaaaauggaucauuuauaauagaugggaaaagccgaaaagaauguccauuuucaaacagaguauggaacucauuucaaauugaagaauuuggaacaggaguauuuacaacaagaguauauauggaugcaguauuugaauacaccauagauugugauggaaguauauuaggagcagcaguaaaugggaaaaaaagcgcucacggaaguccaacguuuuggaugggaucacacgagguaaauggcacguggaugauacauacuuuagaagcauuagauuacaaagaaugugaauggccauuaacucauacaauagguacaagcguagaagaaagugagauguuuaugccacguucaaucggggggccaguaucaagucauaaccauauaccaggauauaaaguacaaacgaauggaccuuggaugcaaguaccacuagaaguaaaacgagaagcaugcccaggaacgucaguaauaauagauggaaauugugauggcagggguaaaagcacaagaucaacaacagauucaggaaaaguaauaccugaaugguguuguagaaguuguacaaugccaccaguaucauuccauggaagugauggaugcugguauccaauggaaauuagaccaagaaaaacucaugaaagucauuuaguaagaucuuggguaacugcaugaggacuaguggaagcauuuuccuggcugauuaaaagaaauuacucagcuauggucaucuguuccuguuagaaggcuaugcagcauauuauauacuaugcgcauguuaugaaaugcauaauaaaaaauuuuaaaaaaucuaaaagaucuaaaaaaaaaaaaaaaaaaaaaaaaaaaaaaaaaaaaaaaaaaaaaaaaaaaaaaaaaaaaaaaaugcaucccccccccccccccccccccccccccccccaaaggcucuuuucagagccaccagaauu

SEQ ID NO: 2387 - RNA, 1712 nt, Artificial Sequence
  mRNA product Design d-5 comprising derived and/or modified sequence from YFV__NC_002031.1__eSS-NS1-Y (polyprotein: aa758-1177) (opt11)
gggagagggcgcuuggcuugcaaggacccugagcugcggcauugaagcacacccaacccaacucgacugaagucagccucacugaaccggaucugagaaucuucucucucugggcuugccagggcucuccgaaccuagcuagcauccucuucaauuccaacuagaaagcuuaccaugagcaugagcaugaucuugguaggggucauaaugauguucuugagccuagggguaggcgcagaccagggaugcgcgauaaacuucggcaaacgcgaacucaaaugcggggacggaaucuucaucuuucgcgacagugacgacuggcuaaacaaguacaguuacuacccggaagaccccguaaaacuagccucaauaguaaaagcgagcuucgaagaaggaaagugcgggcuaaacagcguggacucccuagagcacgagauguggaggucgagagcggacgagaucaacgccauauucgaagaaaaugaaguagacauaagcguagucguacaagaucccaaaaacguguaccagcgcggaacccaccccuucagcaggaucagagacgggcuacaauacggauggaagacauggggcaaaaaccuggucuucagcccgggcaggaaaaacggaucguucaucaucgauggcaaaagccgaaaggagugcccguucucaaacaggguauggaacucguuccagaucgaagaguucggcacaggcgucuucacgacaagagucuacauggacgcaguguucgaauacacaaucgacugcgacggcuccauacugggcgcagccgugaacgggaaaaagagcgcacacggaagcccgaccuuuuggauggguucgcacgaggugaacggaacauggaugauacacaccuuagaagcacucgauuacaaagaaugcgaauggcccuuaacccacaccaucgguacguccguagaagaaagcgaaauguucaugccgcgcucaaucggcggcccagucucgagccacaaccacaucccgggcuauaaaguacaaacaaacgggccauggaugcagguaccccucgaggucaagcgcgaagccugccccggaaccucggucaucaucgacggcaacugcgacggcaggggaaaaagcacgcgcucaaccacggacucgggaaagguaauaccagaguggugcugcaggagcugcaccaugccaccgguaucguuccacggcucagacggaugcugguacccgauggaaaucagacccagaaaaacgcacgagagccaccucguacgcucauggguaaccgcaggcgagauccacgccgugccauuuggacuggucucaaugaugauagcgauggaggucgugcucaggaagaggcaagggcccaagcaaaugcucguaggaggaguaguacuccugggcgcaaugcuggucggacaggugaccugaggacuaguggaagcauuuuccuggcugauuaaaagaaauuacucagcuauggucaucuguuccuguuagaaggcuaugcagcauauuauauacuaugcgcauguuaugaaaugcauaauaaaaaauuuuaaaaaaucuaaaagaucuaaaaaaaaaaaaaaaaaaaaaaaaaaaaaaaaaaaaaaaaaaaaaaaaaaaaaaaaaaaaaaaaugcaucccccccccccccccccccccccccccccccaaaggcucuuuucagagccaccagaauu

SEQ ID NO: 2388 - RNA, 1571 nt, Artificial Sequence
  mRNA product Design d-5 comprising derived and/or modified sequence from YFV__NC_002031.1__eSS-NS1 (polyprotein: aa758-1130) (opt11)
gggagagggcgcuuggcuugcaaggacccugagcugcggcauugaagcacacccaacccaacucgacugaagucagccucacugaaccggaucugagaaucuucucucucugggcuugccagggcucuccgaaccuagcuagcauccucuucaauuccaacuagaaagcuuaccaugagcaugagcaugaucuugguaggggucauaaugauguucuugagccuagggguaggcgcagaccagggaugcgcgauaaacuucggcaaacgcgaacucaaaugcggggacggaaucuucaucuuucgcgacagugacgacuggcuaaacaaguacaguuacuacccggaagaccccguaaaacuagccucaauaguaaaagcgagcuucgaagaaggaaagugcgggcuaaacagcguggacucccuagagcacgagauguggaggucgagagcggacgagaucaacgccauauucgaagaaaaugaaguagacauaagcguagucguacaagaucccaaaaacguguaccagcgcggaacccaccccuucagcaggaucagagacgggcuacaauacggauggaagacauggggcaaaaaccuggucuucagcccgggcaggaaaaacggaucguucaucaucgauggcaaaagccgaaaggagugcccguucucaaacaggguauggaacucguuccagaucgaagaguucggcacaggcgucuucacgacaagagucuacauggacgcaguguucgaauacacaaucgacugcgacggcuccauacugggcgcagccgugaacgggaaaaagagcgcacacggaagcccgaccuuuuggauggguucgcacgaggugaacggaacauggaugauacacaccuuagaagcacucgauuacaaagaaugcgaauggcccuuaacccacaccaucgguacguccguagaagaaagcgaaauguucaugccgcgcucaaucggcggcccagucucgagccacaaccacaucccgggcuauaaaguacaaacaaacgggccauggaugcagguaccccucgaggucaagcgcgaagccugccccggaaccucggucaucaucgacggcaacugcgacggcaggggaaaaagcacgcgcucaaccacggacucgggaaagguaauaccagaguggugcugcaggagcugcaccaugccaccgguaucguuccacggcucagacggaugcugguacccgauggaaaucagacccagaaaaacgcacgagagccaccucguacgcucauggguaaccgcaugaggacuaguggaagcauuuuccuggcugauuaaaagaaauuacucagcuauggucaucuguuccuguuagaaggcuaugcagcauauuauauacuaugcgcauguuaugaaaugcauaauaaaaaauuuuaaaaaaucuaaaagaucuaaaaaaaaaaaaaaaaaaaaaaaaaaaaaaaaaaaaaaaaaaaaaaaaaaaaaaaaaaaaaaaaugcaucccccccccccccccccccccccccccccccaaaggcucuuuucagagccaccagaauu

SEQ ID NO: 2389 - RNA, 1562 nt, Artificial Sequence
  mRNA product Design d-5 comprising derived and/or modified sequence from YFV__NC_002031.1__SSIgE-NS1 (polyprotein: aa779-1130) (opt11)
gggagagggcgcuuggcuugcaaggacccugagcugcggcauugaagcacacccaacccaacucgacugaagucagccucacugaaccggaucugagaaucuucucucucugggcuugccagggcucuccgaaccuagcuagcauccucuucaauuccaacuagaaagcuuaccauggauuggacguggauacucuuucucguggccgcggccacgcgcgugcacucggaccagggaugcgcgauaaacuucggcaaacgcgaacucaaaugcggggacggaaucuucaucuuucgcgacagugacgacuggcuaaacaaguacaguuacuacccggaagaccccguaaaacuagccucaauaguaaaagcgagcuucgaagaaggaaagugcgggcuaaacagcguggacucccuagagcacgagauguggaggucgagagcggacgagaucaacgccauauucgaagaaaaugaaguagacauaagcguagucguacaagaucccaaaaacguguaccagcgcggaacccaccccuucagcaggaucagagacgggcuacaauacggauggaagacauggggcaaaaaccuggucuucagcccgggcaggaaaaacggaucguucaucaucgauggcaaaagccgaaaggagugcccguucucaaacaggguauggaacucguuccagaucgaagaguucggcacaggcgucuucacgacaagagucuacauggacgcaguguucgaauacacaaucgacugcgacggcuccauacugggcgcagccgugaacgggaaaaagagcgcacacggaagcccgaccuuuuggauggguucgcacgaggugaacggaacauggaugauacacaccuuagaagcacucgauuacaaagaaugcgaauggcccuuaacccacaccaucgguacguccguagaagaaagcgaaauguucaugccgcgcucaaucggcggcccagucucgagccacaaccacaucccgggcuauaaaguacaaacaaacgggccauggaugcagguaccccucgaggucaagcgcgaagccugccccggaaccucggucaucaucgacggcaacugcgacggcaggggaaaaagcacgcgcucaaccacggacucgggaaagguaauaccagaguggugcugcaggagcugcaccaugccaccgguaucguuccacggcucagacggaugcugguacccgauggaaaucagacccagaaaaacgcacgagagccaccucguacgcucauggguaaccgcaugaggacuaguggaagcauuuuccuggcugauuaaaagaaauuacucagcuauggucaucuguuccuguuagaaggcuaugcagcauauuauauacuaugcgcauguuaugaaaugcauaauaaaaaauuuuaaaaaaucuaaaagaucuaaaaaaaaaaaaaaaaaaaaaaaaaaaaaaaaaaaaaaaaaaaaaaaaaaaaaaaaaaaaaaaaugcaucccccccccccccccccccccccccccccccaaaggcucuuuucagagccaccagaauu

SEQ ID NO: 2390 - RNA, 1649 nt, Artificial Sequence
  mRNA product Design g-4 comprising derived and/or modified sequence from YFV__NC_002031.1__eSS-NS1-Y (polyprotein: aa758-1177) (wt)
gggagacuccugucgggcggaaguaggaggaguagaguuuaaaaacaguacucuuuuuccgguucgggacguaguugaagcaacgacaagccggauaaccgcucuugagacaggaagcuuaccauguccaugagcaugaucuugguaggagugaucaugauguuuuugucucuaggaguuggggcggaucaaggaugcgccaucaacuuuggcaagagagagcucaagugcggagaugguaucuucauauuuagagacucugaugacuggcugaacaaguacucauacuauccagaagauccugugaagcuugcaucaauagugaaagccucuuuugaagaagggaaguguggccuaaauucaguugacucccuugagcaugagauguggagaagcagggcagaugagaucaaugccauuuuugaggaaaacgagguggacauuucuguugucgugcaggauccaaagaauguuuaccagagaggaacucauccauuuuccagaauucgggauggucugcaguaugguuggaagacuugggguaagaaccuuguguucuccccagggaggaagaauggaagcuucaucauagauggaaaguccaggaaagaaugcccguuuucaaaccgggucuggaauucuuuccagauagaggaguuugggacgggaguguucaccacacgcguguacauggacgcagucuuugaauacaccauagacugcgauggaucuaucuugggugcagcggugaacggaaaaaagagugcccauggcucuccaacauuuuggaugggaagucaugaaguaaaugggacauggaugauccacaccuuggaggcauuagauuacaaggagugugaguggccacugacacauacgauuggaacaucaguugaagagagugaaauguucaugccgagaucaaucggaggcccaguuagcucucacaaucauaucccuggauacaagguucagacgaacggaccuuggaugcagguaccacuagaagugaagagagaagcuugcccagggacuagcgugaucauugauggcaacugugauggacggggaaaaucaaccagauccaccacggauagcgggaaaguuauuccugaaugguguugccgcuccugcacaaugccgccugugagcuuccaugguagugauggguguugguaucccauggaaauuaggccaaggaaaacgcaugaaagccaucuggugcgcuccuggguuacagcuggagaaauacaugcugucccuuuugguuuggugagcaugaugauagcaauggaagugguccuaaggaaaagacagggaccaaagcaaauguugguuggaggaguagugcucuugggagcaaugcuggucgggcaaguaacuugaggacuaguaauaaggaaacuguaugaaugucugugggcaggaagugaagagauccuucuguaaagguuuuuggaauuaugucugcugaauaauaaacuuuuuugaaauaauaaaucugguagaaaaaugagaucuaaaaaaaaaaaaaaaaaaaaaaaaaaaaaaaaaaaaaaaaaaaaaaaaaaaaaaaaaaaaaaaaugcaucccccccccccccccccccccccccccccccaaaggcucuuuucagagccaccagaauu

SEQ ID NO: 2391 - RNA, 1508 nt, Artificial Sequence
  mRNA product Design g-4 comprising derived and/or modified sequence from YFV__NC_002031.1__eSS-NS1 (polyprotein: aa758-1130) (wt)
gggagacuccugucgggcggaaguaggaggaguagaguuuaaaaacaguacucuuuuuccgguucgggacguaguugaagcaacgacaagccggauaaccgcucuugagacaggaagcuuaccauguccaugagcaugaucuugguaggagugaucaugauguuuuugucucuaggaguuggggcggaucaaggaugcgccaucaacuuuggcaagagagagcucaagugcggagaugguaucuucauauuuagagacucugaugacuggcugaacaaguacucauacuauccagaagauccugugaagcuugcaucaauagugaaagccucuuuugaagaagggaaguguggccuaaauucaguugacucccuugagcaugagauguggagaagcagggcagaugagaucaaugccauuuuugaggaaaacgagguggacauuucuguugucgugcaggauccaaagaauguuuaccagagaggaacucauccauuuuccagaauucgggauggucugcaguaugguuggaagacuugggguaagaaccuuguguucuccccagggaggaagaauggaagcuucaucauagauggaaaguccaggaaagaaugcccguuuucaaaccgggucuggaauucuuuccagauagaggaguuugggacgggaguguucaccacacgcguguacauggacgcagucuuugaauacaccauagacugcgauggaucuaucuugggugcagcggugaacggaaaaaagagugcccauggcucuccaacauuuuggaugggaagucaugaaguaaaugggacauggaugauccacaccuuggaggcauuagauuacaaggagugugaguggccacugacacauacgauuggaacaucaguugaagagagugaaauguucaugccgagaucaaucggaggcccaguuagcucucacaaucauaucccuggauacaagguucagacgaacggaccuuggaugcagguaccacuagaagugaagagagaagcuugcccagggacuagcgugaucauugauggcaacugugauggacggggaaaaucaaccagauccaccacggauagcgggaaaguuauuccugaaugguguugccgcuccugcacaaugccgccugugagcuuccaugguagugauggguguugguaucccauggaaauuaggccaaggaaaacgcaugaaagccaucuggugcgcuccuggguuacagcuugaggacuaguaauaaggaaacuguaugaaugucugugggcaggaagugaagagauccuucuguaaagguuuuuggaauuaugucugcugaauaauaaacuuuuuugaaauaauaaaucugguagaaaaaugagaucuaaaaaaaaaaaaaaaaaaaaaaaaaaaaaaaaaaaaaaaaaaaaaaaaaaaaaaaaaaaaaaaaugcaucccccccccccccccccccccccccccccccaaaggcucuuuucagagccaccagaauu

SEQ ID NO: 2392 - RNA, 1499 nt, Artificial Sequence
  mRNA product Design g-4 comprising derived and/or modified sequence from YFV__NC_002031.1__SSIgE-NS1 (polyprotein: aa779-1130) (wt)
gggagacuccugucgggcggaaguaggaggaguagaguuuaaaaacaguacucuuuuuccgguucgggacguaguugaagcaacgacaagccggauaaccgcucuugagacaggaagcuuaccauggacuggaccuggauccuguuccucguggccgccgcgacccgcguccacagcgaucaaggaugcgccaucaacuuuggcaagagagagcucaagugcggagaugguaucuucauauuuagagacucugaugacuggcugaacaaguacucauacuauccagaagauccugugaagcuugcaucaauagugaaagccucuuuugaagaagggaaguguggccuaaauucaguugacucccuugagcaugagauguggagaagcagggcagaugagaucaaugccauuuuugaggaaaacgagguggacauuucuguugucgugcaggauccaaagaauguuuaccagagaggaacucauccauuuuccagaauucgggauggucugcaguaugguuggaagacuugggguaagaaccuuguguucuccccagggaggaagaauggaagcuucaucauagauggaaaguccaggaaagaaugcccguuuucaaaccgggucuggaauucuuuccagauagaggaguuugggacgggaguguucaccacacgcguguacauggacgcagucuuugaauacaccauagacugcgauggaucuaucuugggugcagcggugaacggaaaaaagagugcccauggcucuccaacauuuuggaugggaagucaugaaguaaaugggacauggaugauccacaccuuggaggcauuagauuacaaggagugugaguggccacugacacauacgauuggaacaucaguugaagagagugaaauguucaugccgagaucaaucggaggcccaguuagcucucacaaucauaucccuggauacaagguucagacgaacggaccuuggaugcagguaccacuagaagugaagagagaagcuugcccagggacuagcgugaucauugauggcaacugugauggacggggaaaaucaaccagauccaccacggauagcgggaaaguuauuccugaaugguguugccgcuccugcacaaugccgccugugagcuuccaugguagugauggguguugguaucccauggaaauuaggccaaggaaaacgcaugaaagccaucuggugcgcuccuggguuacagcuugaggacuaguaauaaggaaacuguaugaaugucugugggcaggaagugaagagauccuucuguaaagguuuuuggaauuaugucugcugaauaauaaacuuuuuugaaauaauaaaucugguagaaaaaugagaucuaaaaaaaaaaaaaaaaaaaaaaaaaaaaaaaaaaaaaaaaaaaaaaaaaaaaaaaaaaaaaaaaugcaucccccccccccccccccccccccccccccccaaaggcucuuuucagagccaccagaauu

SEQ ID NO: 2393 - RNA, 1649 nt, Artificial Sequence
  mRNA product Design g-4 comprising derived and/or modified sequence from YFV__NC_002031.1__eSS-NS1-Y (polyprotein: aa758-1177) (opt1)
gggagacuccugucgggcggaaguaggaggaguagaguuuaaaaacaguacucuuuuuccgguucgggacguaguugaagcaacgacaagccggauaaccgcucuugagacaggaagcuuaccaugagcauguccaugauccuggugggcgucaucaugauguuccucagccugggggugggcgccgaccaggggugcgccaucaacuucggcaagcgcgagcugaagugcggggacggcaucuucaucuuccgggacuccgacgacuggcucaacaaguacagcuacuaccccgaggacccggugaagcuggcguccaucgucaaggccagcuucgaggagggcaagugcgggcugaacuccguggacagccucgagcacgagauguggcgcucccgggccgacgagaucaacgccaucuucgaggagaacgagguggacaucagcgucguggugcaggaccccaagaacgucuaccagcgcggcacccaccccuucucccggauccgcgacgggcugcaguacggcuggaagaccugggggaagaaccugguguucagccccggccggaagaacggcuccuucaucaucgacggcaagagccgcaaggagugcccguucuccaaccggguguggaacagcuuccagaucgaggaguucgggacgggggucuucaccacccgcguguacauggacgccguguucgaguacaccaucgacugcgacggcuccauccucggcgcggccgucaacgggaagaaguccgcccacggcagccccacguucuggauggggagccacgaggugaacggcaccuggaugauccacacccuggaggcccuggacuacaaggagugcgaguggccccucacccacacgaucgggaccagcguggaggaguccgagauguucaugccccggagcaucggcggcccggucuccagccacaaccacauccccggguacaaggugcagaccaacggccccuggaugcaggucccccuggaggugaagcgcgaggcgugcccggggaccuccgugaucaucgacggcaacugcgacgggcggggcaagagcacgcgcuccaccaccgacagcggcaaggugauccccgaguggugcugccgguccugcaccaugccgcccgucagcuuccacggguccgacggcugcugguaccccauggagauccgcccccggaagacgcacgagagccaccuggugcgcuccugggucaccgccggggagauccacgccgugcccuucggccucgugagcaugaugaucgccauggaggucgugcugcggaagcgccaggggcccaagcagaugcuggugggcggcgucgugcuccugggggccaugcuggugggccaggucaccugaggacuaguaauaaggaaacuguaugaaugucugugggcaggaagugaagagauccuucuguaaagguuuuuggaauuaugucugcugaauaauaaacuuuuuugaaauaauaaaucugguagaaaaaugagaucuaaaaaaaaaaaaaaaaaaaaaaaaaaaaaaaaaaaaaaaaaaaaaaaaaaaaaaaaaaaaaaaaugcaucccccccccccccccccccccccccccccccaaaggcucuuuucagagccaccagaauu

SEQ ID NO: 2394 - RNA, 1508 nt, Artificial Sequence
  mRNA product Design g-4 comprising derived and/or modified sequence from YFV__NC_002031.1__eSS-NS1 (polyprotein: aa758-1130) (opt1)
gggagacuccugucgggcggaaguaggaggaguagaguuuaaaaacaguacucuuuuuccgguucgggacguaguugaagcaacgacaagccggauaaccgcucuugagacaggaagcuuaccaugagcauguccaugauccuggugggcgucaucaugauguuccucagccugggggugggcgccgaccaggggugcgccaucaacuucggcaagcgcgagcugaagugcggggacggcaucuucaucuuccgggacuccgacgacuggcucaacaaguacagcuacuaccccgaggacccggugaagcuggcguccaucgucaaggccagcuucgaggagggcaagugcgggcugaacuccguggacagccucgagcacgagauguggcgcucccgggccgacgagaucaacgccaucuucgaggagaacgagguggacaucagcgucguggugcaggaccccaagaacgucuaccagcgcggcacccaccccuucucccggauccgcgacgggcugcaguacggcuggaagaccugggggaagaaccugguguucagccccggccggaagaacggcuccuucaucaucgacggcaagagccgcaaggagugcccguucuccaaccggguguggaacagcuuccagaucgaggaguucgggacgggggucuucaccacccgcguguacauggacgccguguucgaguacaccaucgacugcgacggcuccauccucggcgcggccgucaacgggaagaaguccgcccacggcagccccacguucuggauggggagccacgaggugaacggcaccuggaugauccacacccuggaggcccuggacuacaaggagugcgaguggccccucacccacacgaucgggaccagcguggaggaguccgagauguucaugccccggagcaucggcggcccggucuccagccacaaccacauccccggguacaaggugcagaccaacggccccuggaugcaggucccccuggaggugaagcgcgaggcgugcccggggaccuccgugaucaucgacggcaacugcgacgggcggggcaagagcacgcgcuccaccaccgacagcggcaaggugauccccgaguggugcugccgguccugcaccaugccgcccgucagcuuccacggguccgacggcugcugguaccccauggagauccgcccccggaagacgcacgagagccaccuggugcgcuccugggucaccgccugaggacuaguaauaaggaaacuguaugaaugucugugggcaggaagugaagagauccuucuguaaagguuuuuggaauuaugucugcugaauaauaaacuuuuuugaaauaauaaaucugguagaaaaaugagaucuaaaaaaaaaaaaaaaaaaaaaaaaaaaaaaaaaaaaaaaaaaaaaaaaaaaaaaaaaaaaaaaaugcaucccccccccccccccccccccccccccccccaaaggcucuuuucagagccaccagaauu

SEQ ID NO: 2395 - RNA, 1499 nt, Artificial Sequence
  mRNA product Design g-4 comprising derived and/or modified sequence from YFV__NC_002031.1__SSIgE-NS1 (polyprotein: aa779-1130) (opt1)
gggagacuccugucgggcggaaguaggaggaguagaguuuaaaaacaguacucuuuuuccgguucgggacguaguugaagcaacgacaagccggauaaccgcucuugagacaggaagcuuaccauggacuggaccuggauccuguuccucguggccgccgcgacccgcguccacagcgaccaggggugcgccaucaacuucggcaagcgcgagcugaagugcggggacggcaucuucaucuuccgggacuccgacgacuggcucaacaaguacagcuacuaccccgaggacccggugaagcuggcguccaucgucaaggccagcuucgaggagggcaagugcgggcugaacuccguggacagccucgagcacgagauguggcgcucccgggccgacgagaucaacgccaucuucgaggagaacgagguggacaucagcgucguggugcaggaccccaagaacgucuaccagcgcggcacccaccccuucucccggauccgcgacgggcugcaguacggcuggaagaccugggggaagaaccugguguucagccccggccggaagaacggcuccuucaucaucgacggcaagagccgcaaggagugcccguucuccaaccggguguggaacagcuuccagaucgaggaguucgggacgggggucuucaccacccgcguguacauggacgccguguucgaguacaccaucgacugcgacggcuccauccucggcgcggccgucaacgggaagaaguccgcccacggcagccccacguucuggauggggagccacgaggugaacggcaccuggaugauccacacccuggaggcccuggacuacaaggagugcgaguggccccucacccacacgaucgggaccagcguggaggaguccgagauguucaugccccggagcaucggcggcccggucuccagccacaaccacauccccggguacaaggugcagaccaacggccccuggaugcaggucccccuggaggugaagcgcgaggcgugcccggggaccuccgugaucaucgacggcaacugcgacgggcggggcaagagcacgcgcuccaccaccgacagcggcaaggugauccccgaguggugcugccgguccugcaccaugccgcccgucagcuuccacggguccgacggcugcugguaccccauggagauccgcccccggaagacgcacgagagccaccuggugcgcuccugggucaccgccugaggacuaguaauaaggaaacuguaugaaugucugugggcaggaagugaagagauccuucuguaaagguuuuuggaauuaugucugcugaauaauaaacuuuuuugaaauaauaaaucugguagaaaaaugagaucuaaaaaaaaaaaaaaaaaaaaaaaaaaaaaaaaaaaaaaaaaaaaaaaaaaaaaaaaaaaaaaaaugcaucccccccccccccccccccccccccccccccaaaggcucuuuucagagccaccagaauu

SEQ ID NO: 2396 - RNA, 1649 nt, Artificial Sequence
  mRNA product Design g-4 comprising derived and/or modified sequence from YFV__NC_002031.1__eSS-NS1-Y (polyprotein: aa758-1177) (opt2)
gggagacuccugucgggcggaaguaggaggaguagaguuuaaaaacaguacucuuuuuccgguucgggacguaguugaagcaacgacaagccggauaaccgcucuugagacaggaagcuuaccauguccauguccaugauccucgucggcgucaucaugauguuccucucccucggcgucggcgccgaccagggcugcgccaucaacuucggcaagcgcgagcucaagugcggcgacggcaucuucaucuuccgcgacuccgacgacuggcucaacaaguacuccuacuaccccgaggaccccgucaagcucgccuccaucgucaaggccuccuucgaggagggcaagugcggccucaacuccgucgacucccucgagcacgagauguggcgcucccgcgccgacgagaucaacgccaucuucgaggagaacgaggucgacaucuccgucgucguccaggaccccaagaacgucuaccagcgcggcacccaccccuucucccgcauccgcgacggccuccaguacggcuggaagaccuggggcaagaaccucgucuucucccccggccgcaagaacggcuccuucaucaucgacggcaagucccgcaaggagugccccuucuccaaccgcgucuggaacuccuuccagaucgaggaguucggcaccggcgucuucaccacccgcgucuacauggacgccgucuucgaguacaccaucgacugcgacggcuccauccucggcgccgccgucaacggcaagaaguccgcccacggcucccccaccuucuggaugggcucccacgaggucaacggcaccuggaugauccacacccucgaggcccucgacuacaaggagugcgaguggccccucacccacaccaucggcaccuccgucgaggaguccgagauguucaugccccgcuccaucggcggccccgucuccucccacaaccacauccccggcuacaagguccagaccaacggccccuggaugcaggucccccucgaggucaagcgcgaggccugccccggcaccuccgucaucaucgacggcaacugcgacggccgcggcaaguccacccgcuccaccaccgacuccggcaaggucauccccgaguggugcugccgcuccugcaccaugccccccgucuccuuccacggcuccgacggcugcugguaccccauggagauccgcccccgcaagacccacgagucccaccucguccgcuccugggucaccgccggcgagauccacgccguccccuucggccucgucuccaugaugaucgccauggaggucguccuccgcaagcgccagggccccaagcagaugcucgucggcggcgucguccuccucggcgccaugcucgucggccaggucaccugaggacuaguaauaaggaaacuguaugaaugucugugggcaggaagugaagagauccuucuguaaagguuuuuggaauuaugucugcugaauaauaaacuuuuuugaaauaauaaaucugguagaaaaaugagaucuaaaaaaaaaaaaaaaaaaaaaaaaaaaaaaaaaaaaaaaaaaaaaaaaaaaaaaaaaaaaaaaaugcaucccccccccccccccccccccccccccccccaaaggcucuuuucagagccaccagaauu

SEQ ID NO: 2397 - RNA, 1508 nt, Artificial Sequence
  mRNA product Design g-4 comprising derived and/or modified sequence from YFV__NC_002031.1__eSS-NS1 (polyprotein: aa758-1130) (opt2)
gggagacuccugucgggcggaaguaggaggaguagaguuuaaaaacaguacucuuuuuccgguucgggacguaguugaagcaacgacaagccggauaaccgcucuugagacaggaagcuuaccauguccauguccaugauccucgucggcgucaucaugauguuccucucccucggcgucggcgccgaccagggcugcgccaucaacuucggcaagcgcgagcucaagugcggcgacggcaucuucaucuuccgcgacuccgacgacuggcucaacaaguacuccuacuaccccgaggaccccgucaagcucgccuccaucgucaaggccuccuucgaggagggcaagugcggccucaacuccgucgacucccucgagcacgagauguggcgcucccgcgccgacgagaucaacgccaucuucgaggagaacgaggucgacaucuccgucgucguccaggaccccaagaacgucuaccagcgcggcacccaccccuucucccgcauccgcgacggccuccaguacggcuggaagaccuggggcaagaaccucgucuucucccccggccgcaagaacggcuccuucaucaucgacggcaagucccgcaaggagugccccuucuccaaccgcgucuggaacuccuuccagaucgaggaguucggcaccggcgucuucaccacccgcgucuacauggacgccgucuucgaguacaccaucgacugcgacggcuccauccucggcgccgccgucaacggcaagaaguccgcccacggcucccccaccuucuggaugggcucccacgaggucaacggcaccuggaugauccacacccucgaggcccucgacuacaaggagugcgaguggccccucacccacaccaucggcaccuccgucgaggaguccgagauguucaugccccgcuccaucggcggccccgucuccucccacaaccacauccccggcuacaagguccagaccaacggccccuggaugcaggucccccucgaggucaagcgcgaggccugccccggcaccuccgucaucaucgacggcaacugcgacggccgcggcaaguccacccgcuccaccaccgacuccggcaaggucauccccgaguggugcugccgcuccugcaccaugccccccgucuccuuccacggcuccgacggcugcugguaccccauggagauccgcccccgcaagacccacgagucccaccucguccgcuccugggucaccgccugaggacuaguaauaaggaaacuguaugaaugucugugggcaggaagugaagagauccuucuguaaagguuuuuggaauuaugucugcugaauaauaaacuuuuuugaaauaauaaaucugguagaaaaaugagaucuaaaaaaaaaaaaaaaaaaaaaaaaaaaaaaaaaaaaaaaaaaaaaaaaaaaaaaaaaaaaaaaaugcaucccccccccccccccccccccccccccccccaaaggcucuuuucagagccaccagaauu

SEQ ID NO: 2398 - RNA, 1499 nt, Artificial Sequence
  mRNA product Design g-4 comprising derived and/or modified sequence from YFV__NC_002031.1__SSIgE-NS1 (polyprotein: aa779-1130) (opt2)
gggagacuccugucgggcggaaguaggaggaguagaguuuaaaaacaguacucuuuuuccgguucgggacguaguugaagcaacgacaagccggauaaccgcucuugagacaggaagcuuaccauggacuggaccuggauccucuuccucgucgccgccgccacccgcguccacuccgaccagggcugcgccaucaacuucggcaagcgcgagcucaagugcggcgacggcaucuucaucuuccgcgacuccgacgacuggcucaacaaguacuccuacuaccccgaggaccccgucaagcucgccuccaucgucaaggccuccuucgaggagggcaagugcggccucaacuccgucgacucccucgagcacgagauguggcgcucccgcgccgacgagaucaacgccaucuucgaggagaacgaggucgacaucuccgucgucguccaggaccccaagaacgucuaccagcgcggcacccaccccuucucccgcauccgcgacggccuccaguacggcuggaagaccuggggcaagaaccucgucuucucccccggccgcaagaacggcuccuucaucaucgacggcaagucccgcaaggagugccccuucuccaaccgcgucuggaacuccuuccagaucgaggaguucggcaccggcgucuucaccacccgcgucuacauggacgccgucuucgaguacaccaucgacugcgacggcuccauccucggcgccgccgucaacggcaagaaguccgcccacggcucccccaccuucuggaugggcucccacgaggucaacggcaccuggaugauccacacccucgaggcccucgacuacaaggagugcgaguggccccucacccacaccaucggcaccuccgucgaggaguccgagauguucaugccccgcuccaucggcggccccgucuccucccacaaccacauccccggcuacaagguccagaccaacggccccuggaugcaggucccccucgaggucaagcgcgaggccugccccggcaccuccgucaucaucgacggcaacugcgacggccgcggcaaguccacccgcuccaccaccgacuccggcaaggucauccccgaguggugcugccgcuccugcaccaugccccccgucuccuuccacggcuccgacggcugcugguaccccauggagauccgcccccgcaagacccacgagucccaccucguccgcuccugggucaccgccugaggacuaguaauaaggaaacuguaugaaugucugugggcaggaagugaagagauccuucuguaaagguuuuuggaauuaugucugcugaauaauaaacuuuuuugaaauaauaaaucugguagaaaaaugagaucuaaaaaaaaaaaaaaaaaaaaaaaaaaaaaaaaaaaaaaaaaaaaaaaaaaaaaaaaaaaaaaaaugcaucccccccccccccccccccccccccccccccaaaggcucuuuucagagccaccagaauu

SEQ ID NO: 2399 - RNA, 1649 nt, Artificial Sequence
  mRNA product Design g-4 comprising derived and/or modified sequence from YFV__NC_002031.1__eSS-NS1-Y (polyprotein: aa758-1177) (opt3)
gggagacuccugucgggcggaaguaggaggaguagaguuuaaaaacaguacucuuuuuccgguucgggacguaguugaagcaacgacaagccggauaaccgcucuugagacaggaagcuuaccaugagcauguccaugauccuggugggcgucauuaugauguuccucucucuugggguuggagccgaccaggguugcgcuauaaacuuuggcaagagagagcugaaauguggggauggaaucuucauuuuuagggacucagaugacugguugaauaaguacaguuauuaccccgaagauccugugaaauuagcaagcaucguaaaggccuccuucgaggaaggcaaaugcggucugaacucuguggacucgcuagagcacgaaauguggcggucacgcgcggaugagauuaaugcuaucuuugaggaaaacgaggucgacauaagcgugguugugcaagauccaaagaaugucuaucagcgagggacccauccguucagucguaucagagacggacuccaguacggcuggaagacauggggcaaaaaccugguguuuucccccgggaggaagaauggaucuuucauuaucgaugguaaaagccggaaggaauguccuuuuuccaaccgcguauggaacucauuccagauugaggaguuuggcacugggguuuucacgaccagaguguauauggacgccgucuuugaauacacaaucgauugcgacggaaguauacuuggcgcagccgugaaugguaaaaagagcgcucacgggucuccaacuuucuggaugggaucccaugaggugaauggcaccuggaugauucacacacuggaagcauuggacuauaaggagugugaauggccccucacccauacuaucggcacaucagucgaggagagcgaaauguucaugccuaggaguauugggggaccaguuucuucccacaaccacauccccgguuacaaagugcaaaccaauggcccuuggaugcagguaccacuggaggugaagcgggaagccugcccggggacgagcgucaucauugauggaaacugugacggccgcgguaaaucgacucgaucuaccacagauuccgggaaggugauacccgaguggugcuguagaucaugcacuaugccuccaguuaguuuucauggcagcgacggauguugguaccccauggaaaucaggccucggaaaacccacgagucccaucuggugcguucuugggucacagcuggcgagauucacgccgugccauucgggcucguaagcaugaugaucgcgauggaaguuguguuacgcaagagacagggacccaaacagaugcuggucgguggcgugguccuuuugggggcaaugcuggugggacaaguuaccugaggacuaguaauaaggaaacuguaugaaugucugugggcaggaagugaagagauccuucuguaaagguuuuuggaauuaugucugcugaauaauaaacuuuuuugaaauaauaaaucugguagaaaaaugagaucuaaaaaaaaaaaaaaaaaaaaaaaaaaaaaaaaaaaaaaaaaaaaaaaaaaaaaaaaaaaaaaaaugcaucccccccccccccccccccccccccccccccaaaggcucuuuucagagccaccagaauu

SEQ ID NO: 2400 - RNA, 1508 nt, Artificial Sequence
  mRNA product Design g-4 comprising derived and/or modified sequence from YFV__NC_002031.1__eSS-NS1 (polyprotein: aa758-1130) (opt3)
gggagacuccugucgggcggaaguaggaggaguagaguuuaaaaacaguacucuuuuuccgguucgggacguaguugaagcaacgacaagccggauaaccgcucuugagacaggaagcuuaccaugagcauguccaugauccuggugggcgucauuaugauguuccucucucuugggguuggagccgaccaggguugcgcuauaaacuuuggcaagagagagcugaaauguggggauggaaucuucauuuuuagggacucagaugacugguugaauaaguacaguuauuaccccgaagauccugugaaauuagcaagcaucguaaaggccuccuucgaggaaggcaaaugcggucugaacucuguggacucgcuagagcacgaaauguggcggucacgcgcggaugagauuaaugcuaucuuugaggaaaacgaggucgacauaagcgugguugugcaagauccaaagaaugucuaucagcgagggacccauccguucagucguaucagagacggacuccaguacggcuggaagacauggggcaaaaaccugguguuuucccccgggaggaagaauggaucuuucauuaucgaugguaaaagccggaaggaauguccuuuuuccaaccgcguauggaacucauuccagauugaggaguuuggcacugggguuuucacgaccagaguguauauggacgccgucuuugaauacacaaucgauugcgacggaaguauacuuggcgcagccgugaaugguaaaaagagcgcucacgggucuccaacuuucuggaugggaucccaugaggugaauggcaccuggaugauucacacacuggaagcauuggacuauaaggagugugaauggccccucacccauacuaucggcacaucagucgaggagagcgaaauguucaugccuaggaguauugggggaccaguuucuucccacaaccacauccccgguuacaaagugcaaaccaauggcccuuggaugcagguaccacuggaggugaagcgggaagccugcccggggacgagcgucaucauugauggaaacugugacggccgcgguaaaucgacucgaucuaccacagauuccgggaaggugauacccgaguggugcuguagaucaugcacuaugccuccaguuaguuuucauggcagcgacggauguugguaccccauggaaaucaggccucggaaaacccacgagucccaucuggugcguucuugggucacagcuugaggacuaguaauaaggaaacuguaugaaugucugugggcaggaagugaagagauccuucuguaaagguuuuuggaauuaugucugcugaauaauaaacuuuuuugaaauaauaaaucugguagaaaaaugagaucuaaaaaaaaaaaaaaaaaaaaaaaaaaaaaaaaaaaaaaaaaaaaaaaaaaaaaaaaaaaaaaaaugcaucccccccccccccccccccccccccccccccaaaggcucuuuucagagccaccagaauu

SEQ ID NO: 2401 - RNA, 1499 nt, Artificial Sequence
  mRNA product Design g-4 comprising derived and/or modified sequence from YFV__NC_002031.1__SSIgE-NS1 (polyprotein: aa779-1130) (opt3)
gggagacuccugucgggcggaaguaggaggaguagaguuuaaaaacaguacucuuuuuccgguucgggacguaguugaagcaacgacaagccggauaaccgcucuugagacaggaagcuuaccauggacuggaccuggauccuguuccucguggccgcugcaacaagaguccacagcgaccaggguugcgcuauaaacuuuggcaagagagagcugaaauguggggauggaaucuucauuuuuagggacucagaugacugguugaauaaguacaguuauuaccccgaagauccugugaaauuagcaagcaucguaaaggccuccuucgaggaaggcaaaugcggucugaacucuguggacucgcuagagcacgaaauguggcggucacgcgcggaugagauuaaugcuaucuuugaggaaaacgaggucgacauaagcgugguugugcaagauccaaagaaugucuaucagcgagggacccauccguucagucguaucagagacggacuccaguacggcuggaagacauggggcaaaaaccugguguuuucccccgggaggaagaauggaucuuucauuaucgaugguaaaagccggaaggaauguccuuuuuccaaccgcguauggaacucauuccagauugaggaguuuggcacugggguuuucacgaccagaguguauauggacgccgucuuugaauacacaaucgauugcgacggaaguauacuuggcgcagccgugaaugguaaaaagagcgcucacgggucuccaacuuucuggaugggaucccaugaggugaauggcaccuggaugauucacacacuggaagcauuggacuauaaggagugugaauggccccucacccauacuaucggcacaucagucgaggagagcgaaauguucaugccuaggaguauugggggaccaguuucuucccacaaccacauccccgguuacaaagugcaaaccaauggcccuuggaugcagguaccacuggaggugaagcgggaagccugcccggggacgagcgucaucauugauggaaacugugacggccgcgguaaaucgacucgaucuaccacagauuccgggaaggugauacccgaguggugcuguagaucaugcacuaugccuccaguuaguuuucauggcagcgacggauguugguaccccauggaaaucaggccucggaaaacccacgagucccaucuggugcguucuugggucacagcuugaggacuaguaauaaggaaacuguaugaaugucugugggcaggaagugaagagauccuucuguaaagguuuuuggaauuaugucugcugaauaauaaacuuuuuugaaauaauaaaucugguagaaaaaugagaucuaaaaaaaaaaaaaaaaaaaaaaaaaaaaaaaaaaaaaaaaaaaaaaaaaaaaaaaaaaaaaaaaugcaucccccccccccccccccccccccccccccccaaaggcucuuuucagagccaccagaauu

SEQ ID NO: 2402 - RNA, 1649 nt, Artificial Sequence
  mRNA product Design g-4 comprising derived and/or modified sequence from YFV__NC_002031.1__eSS-NS1-Y (polyprotein: aa758-1177) (opt4)
gggagacuccugucgggcggaaguaggaggaguagaguuuaaaaacaguacucuuuuuccgguucgggacguaguugaagcaacgacaagccggauaaccgcucuugagacaggaagcuuaccaugagcaugagcaugauccuggugggcgugaucaugauguuccugagccugggcgugggcgccgaccagggcugcgccaucaacuucggcaagagagagcugaagugcggcgacggcaucuucaucuucagagacagcgacgacuggcugaacaaguacagcuacuaccccgaggaccccgugaagcuggccagcaucgugaaggccagcuucgaggagggcaagugcggccugaacagcguggacagccuggagcacgagauguggagaagcagagccgacgagaucaacgccaucuucgaggagaacgagguggacaucagcgugguggugcaggaccccaagaacguguaccagagaggcacccaccccuucagcagaaucagagacggccugcaguacggcuggaagaccuggggcaagaaccugguguucagccccggcagaaagaacggcagcuucaucaucgacggcaagagcagaaaggagugccccuucagcaacagaguguggaacagcuuccagaucgaggaguucggcaccggcguguucaccaccagaguguacauggacgccguguucgaguacaccaucgacugcgacggcagcauccugggcgccgccgugaacggcaagaagagcgcccacggcagccccaccuucuggaugggcagccacgaggugaacggcaccuggaugauccacacccuggaggcccuggacuacaaggagugcgaguggccccugacccacaccaucggcaccagcguggaggagagcgagauguucaugcccagaagcaucggcggccccgugagcagccacaaccacauccccggcuacaaggugcagaccaacggccccuggaugcaggugccccuggaggugaagagagaggccugccccggcaccagcgugaucaucgacggcaacugcgacggcagaggcaagagcaccagaagcaccaccgacagcggcaaggugauccccgaguggugcugcagaagcugcaccaugccccccgugagcuuccacggcagcgacggcugcugguaccccauggagaucagacccagaaagacccacgagagccaccuggugagaagcugggugaccgccggcgagauccacgccgugcccuucggccuggugagcaugaugaucgccauggagguggugcugagaaagagacagggccccaagcagaugcuggugggcggcguggugcugcugggcgccaugcuggugggccaggugaccugaggacuaguaauaaggaaacuguaugaaugucugugggcaggaagugaagagauccuucuguaaagguuuuuggaauuaugucugcugaauaauaaacuuuuuugaaauaauaaaucugguagaaaaaugagaucuaaaaaaaaaaaaaaaaaaaaaaaaaaaaaaaaaaaaaaaaaaaaaaaaaaaaaaaaaaaaaaaaugcaucccccccccccccccccccccccccccccccaaaggcucuuuucagagccaccagaauu

SEQ ID NO: 2403 - RNA, 1508 nt, Artificial Sequence
  mRNA product Design g-4 comprising derived and/or modified sequence from YFV__NC_002031.1__eSS-NS1 (polyprotein: aa758-1130) (opt4)
gggagacuccugucgggcggaaguaggaggaguagaguuuaaaaacaguacucuuuuuccgguucgggacguaguugaagcaacgacaagccggauaaccgcucuugagacaggaagcuuaccaugagcaugagcaugauccuggugggcgugaucaugauguuccugagccugggcgugggcgccgaccagggcugcgccaucaacuucggcaagagagagcugaagugcggcgacggcaucuucaucuucagagacagcgacgacuggcugaacaaguacagcuacuaccccgaggaccccgugaagcuggccagcaucgugaaggccagcuucgaggagggcaagugcggccugaacagcguggacagccuggagcacgagauguggagaagcagagccgacgagaucaacgccaucuucgaggagaacgagguggacaucagcgugguggugcaggaccccaagaacguguaccagagaggcacccaccccuucagcagaaucagagacggccugcaguacggcuggaagaccuggggcaagaaccugguguucagccccggcagaaagaacggcagcuucaucaucgacggcaagagcagaaaggagugccccuucagcaacagaguguggaacagcuuccagaucgaggaguucggcaccggcguguucaccaccagaguguacauggacgccguguucgaguacaccaucgacugcgacggcagcauccugggcgccgccgugaacggcaagaagagcgcccacggcagccccaccuucuggaugggcagccacgaggugaacggcaccuggaugauccacacccuggaggcccuggacuacaaggagugcgaguggccccugacccacaccaucggcaccagcguggaggagagcgagauguucaugcccagaagcaucggcggccccgugagcagccacaaccacauccccggcuacaaggugcagaccaacggccccuggaugcaggugccccuggaggugaagagagaggccugccccggcaccagcgugaucaucgacggcaacugcgacggcagaggcaagagcaccagaagcaccaccgacagcggcaaggugauccccgaguggugcugcagaagcugcaccaugccccccgugagcuuccacggcagcgacggcugcugguaccccauggagaucagacccagaaagacccacgagagccaccuggugagaagcugggugaccgccugaggacuaguaauaaggaaacuguaugaaugucugugggcaggaagugaagagauccuucuguaaagguuuuuggaauuaugucugcugaauaauaaacuuuuuugaaauaauaaaucugguagaaaaaugagaucuaaaaaaaaaaaaaaaaaaaaaaaaaaaaaaaaaaaaaaaaaaaaaaaaaaaaaaaaaaaaaaaaugcaucccccccccccccccccccccccccccccccaaaggcucuuuucagagccaccagaauu

SEQ ID NO: 2404 - RNA, 1499 nt, Artificial Sequence
  mRNA product Design g-4 comprising derived and/or modified sequence from YFV__NC_002031.1__SSIgE-NS1 (polyprotein: aa779-1130) (opt4)
gggagacuccugucgggcggaaguaggaggaguagaguuuaaaaacaguacucuuuuuccgguucgggacguaguugaagcaacgacaagccggauaaccgcucuugagacaggaagcuuaccauggacuggaccuggauccuguuccugguggccgccgccaccagagugcacagcgaccagggcugcgccaucaacuucggcaagagagagcugaagugcggcgacggcaucuucaucuucagagacagcgacgacuggcugaacaaguacagcuacuaccccgaggaccccgugaagcuggccagcaucgugaaggccagcuucgaggagggcaagugcggccugaacagcguggacagccuggagcacgagauguggagaagcagagccgacgagaucaacgccaucuucgaggagaacgagguggacaucagcgugguggugcaggaccccaagaacguguaccagagaggcacccaccccuucagcagaaucagagacggccugcaguacggcuggaagaccuggggcaagaaccugguguucagccccggcagaaagaacggcagcuucaucaucgacggcaagagcagaaaggagugccccuucagcaacagaguguggaacagcuuccagaucgaggaguucggcaccggcguguucaccaccagaguguacauggacgccguguucgaguacaccaucgacugcgacggcagcauccugggcgccgccgugaacggcaagaagagcgcccacggcagccccaccuucuggaugggcagccacgaggugaacggcaccuggaugauccacacccuggaggcccuggacuacaaggagugcgaguggccccugacccacaccaucggcaccagcguggaggagagcgagauguucaugcccagaagcaucggcggccccgugagcagccacaaccacauccccggcuacaaggugcagaccaacggccccuggaugcaggugccccuggaggugaagagagaggccugccccggcaccagcgugaucaucgacggcaacugcgacggcagaggcaagagcaccagaagcaccaccgacagcggcaaggugauccccgaguggugcugcagaagcugcaccaugccccccgugagcuuccacggcagcgacggcugcugguaccccauggagaucagacccagaaagacccacgagagccaccuggugagaagcugggugaccgccugaggacuaguaauaaggaaacuguaugaaugucugugggcaggaagugaagagauccuucuguaaagguuuuuggaauuaugucugcugaauaauaaacuuuuuugaaauaauaaaucugguagaaaaaugagaucuaaaaaaaaaaaaaaaaaaaaaaaaaaaaaaaaaaaaaaaaaaaaaaaaaaaaaaaaaaaaaaaaugcaucccccccccccccccccccccccccccccccaaaggcucuuuucagagccaccagaauu

SEQ ID NO: 2405 - RNA, 1649 nt, Artificial Sequence
  mRNA product Design g-4 comprising derived and/or modified sequence from YFV__NC_002031.1__eSS-NS1-Y (polyprotein: aa758-1177) (opt5)
gggagacuccugucgggcggaaguaggaggaguagaguuuaaaaacaguacucuuuuuccgguucgggacguaguugaagcaacgacaagccggauaaccgcucuugagacaggaagcuuaccaugagcauguccaugauccuggugggcgucauuaugauguuccucucucuggggguuggagccgaccagggcugcgcuaucaacuuugggaagagagagcuuaaauguggagauggcauuuucaucuuucgggacagcgaugacuggcugaauaaguacuccuauuaccccgaagauccugugaaacucgccucuauugugaaggcgagcuucgaggaagggaaaugcggacugaacuccgucgacucucuugagcacgaaauguggcgcagcagagcugaugagaucaaugccaucuuugaggaaaacgagguggacauuuccguugugguccaagauccgaagaauguguaucagcggggcacccaucccuucagccgcaucagagacggccugcaguacggguggaagacauggggcaaaaaccucguguuuucuccuggacggaagaauggguccuucauuaucgauggaaaaagccgcaaggaaugucccuuuucuaacagaguguggaacuccuuccagauugaggaguuuggcacgggggucuucaccacacggguguauauggacgccguguuugaauacaccaucgauugcgacggaagcauucugggcgcugccgucaauggcaaaaagucugcucacggguccccuacauucuggaugggaagccaugagguuaauggcaccuggaugauccacacacuggaagcccucgacuauaaggagugugaauggccccugacccauacgaucgggaccuccguggaggagucugaaauguucaugccucgcagcauuggaggcccgguguccagccacaaccacauccccggguacaaaguccaaacaaauggaccuuggaugcagguuccccuugagguuaagagagaagcgugcccuggcaccucugugauuaucgauggcaacugugacgggcggggaaaauccacacgcagcaccacggauucuggcaaggucauucccgaguggugcuguagaagcugcacaaugccgccuguguccuuucaugggucugacggauguugguaccccauggaaauccggccucgcaaaacccacgagagccaucugguuagauccugggugacagccggcgagauccacgcuguccccuucgggcucgugagcaugaugauugccauggaagucgugcugcggaagagacagggccccaaacagaugcuuguuggaggcgugguccugcucggggcuaugcuggugggacaaguuaccugaggacuaguaauaaggaaacuguaugaaugucugugggcaggaagugaagagauccuucuguaaagguuuuuggaauuaugucugcugaauaauaaacuuuuuugaaauaauaaaucugguagaaaaaugagaucuaaaaaaaaaaaaaaaaaaaaaaaaaaaaaaaaaaaaaaaaaaaaaaaaaaaaaaaaaaaaaaaaugcaucccccccccccccccccccccccccccccccaaaggcucuuuucagagccaccagaauu

SEQ ID NO: 2406 - RNA, 1508 nt, Artificial Sequence
  mRNA product Design g-4 comprising derived and/or modified sequence from YFV__NC_002031.1__eSS-NS1 (polyprotein: aa758-1130) (opt5)
gggagacuccugucgggcggaaguaggaggaguagaguuuaaaaacaguacucuuuuuccgguucgggacguaguugaagcaacgacaagccggauaaccgcucuugagacaggaagcuuaccaugagcauguccaugauccuggugggcgucauuaugauguuccucucucuggggguuggagccgaccagggcugcgcuaucaacuuugggaagagagagcuuaaauguggagauggcauuuucaucuuucgggacagcgaugacuggcugaauaaguacuccuauuaccccgaagauccugugaaacucgccucuauugugaaggcgagcuucgaggaagggaaaugcggacugaacuccgucgacucucuugagcacgaaauguggcgcagcagagcugaugagaucaaugccaucuuugaggaaaacgagguggacauuuccguugugguccaagauccgaagaauguguaucagcggggcacccaucccuucagccgcaucagagacggccugcaguacggguggaagacauggggcaaaaaccucguguuuucuccuggacggaagaauggguccuucauuaucgauggaaaaagccgcaaggaaugucccuuuucuaacagaguguggaacuccuuccagauugaggaguuuggcacgggggucuucaccacacggguguauauggacgccguguuugaauacaccaucgauugcgacggaagcauucugggcgcugccgucaauggcaaaaagucugcucacggguccccuacauucuggaugggaagccaugagguuaauggcaccuggaugauccacacacuggaagcccucgacuauaaggagugugaauggccccugacccauacgaucgggaccuccguggaggagucugaaauguucaugccucgcagcauuggaggcccgguguccagccacaaccacauccccggguacaaaguccaaacaaauggaccuuggaugcagguuccccuugagguuaagagagaagcgugcccuggcaccucugugauuaucgauggcaacugugacgggcggggaaaauccacacgcagcaccacggauucuggcaaggucauucccgaguggugcuguagaagcugcacaaugccgccuguguccuuucaugggucugacggauguugguaccccauggaaauccggccucgcaaaacccacgagagccaucugguuagauccugggugacagccugaggacuaguaauaaggaaacuguaugaaugucugugggcaggaagugaagagauccuucuguaaagguuuuuggaauuaugucugcugaauaauaaacuuuuuugaaauaauaaaucugguagaaaaaugagaucuaaaaaaaaaaaaaaaaaaaaaaaaaaaaaaaaaaaaaaaaaaaaaaaaaaaaaaaaaaaaaaaaugcaucccccccccccccccccccccccccccccccaaaggcucuuuucagagccaccagaauu

SEQ ID NO: 2407 - RNA, 1499 nt, Artificial Sequence
  mRNA product Design g-4 comprising derived and/or modified sequence from YFV__NC_002031.1__SSIgE-NS1 (polyprotein: aa779-1130) (opt5)
gggagacuccugucgggcggaaguaggaggaguagaguuuaaaaacaguacucuuuuuccgguucgggacguaguugaagcaacgacaagccggauaaccgcucuugagacaggaagcuuaccauggacuggaccuggauccuguuccucguggccgcugccacaagaguccacagcgaccagggcugcgcuaucaacuuugggaagagagagcuuaaauguggagauggcauuuucaucuuucgggacagcgaugacuggcugaauaaguacuccuauuaccccgaagauccugugaaacucgccucuauugugaaggcgagcuucgaggaagggaaaugcggacugaacuccgucgacucucuugagcacgaaauguggcgcagcagagcugaugagaucaaugccaucuuugaggaaaacgagguggacauuuccguugugguccaagauccgaagaauguguaucagcggggcacccaucccuucagccgcaucagagacggccugcaguacggguggaagacauggggcaaaaaccucguguuuucuccuggacggaagaauggguccuucauuaucgauggaaaaagccgcaaggaaugucccuuuucuaacagaguguggaacuccuuccagauugaggaguuuggcacgggggucuucaccacacggguguauauggacgccguguuugaauacaccaucgauugcgacggaagcauucugggcgcugccgucaauggcaaaaagucugcucacggguccccuacauucuggaugggaagccaugagguuaauggcaccuggaugauccacacacuggaagcccucgacuauaaggagugugaauggccccugacccauacgaucgggaccuccguggaggagucugaaauguucaugccucgcagcauuggaggcccgguguccagccacaaccacauccccggguacaaaguccaaacaaauggaccuuggaugcagguuccccuugagguuaagagagaagcgugcccuggcaccucugugauuaucgauggcaacugugacgggcggggaaaauccacacgcagcaccacggauucuggcaaggucauucccgaguggugcuguagaagcugcacaaugccgccuguguccuuucaugggucugacggauguugguaccccauggaaauccggccucgcaaaacccacgagagccaucugguuagauccugggugacagccugaggacuaguaauaaggaaacuguaugaaugucugugggcaggaagugaagagauccuucuguaaagguuuuuggaauuaugucugcugaauaauaaacuuuuuugaaauaauaaaucugguagaaaaaugagaucuaaaaaaaaaaaaaaaaaaaaaaaaaaaaaaaaaaaaaaaaaaaaaaaaaaaaaaaaaaaaaaaaugcaucccccccccccccccccccccccccccccccaaaggcucuuuucagagccaccagaauu

SEQ ID NO: 2408 - RNA, 1649 nt, Artificial Sequence
  mRNA product Design g-4 comprising derived and/or modified sequence from YFV__NC_002031.1__eSS-NS1-Y (polyprotein: aa758-1177) (opt6)
gggagacuccugucgggcggaaguaggaggaguagaguuuaaaaacaguacucuuuuuccgguucgggacguaguugaagcaacgacaagccggauaaccgcucuugagacaggaagcuuaccaugucaaugaguaugauauuaguagggguaauaaugauguuccuuagcuuaggaguaggagcagaucaaggaugugcaauaaauuuuggaaaaagagaacuaaaaugcggagacgguauauuuauauuuagagauagugaugauuggcuaaauaaauauaguuacuauccagaagauccaguuaaauuagccucaauaguaaaagcuagcuuugaagaaggaaaauguggacuaaauucaguagacagucuagaacacgaaauguggagaucaagggcagaugaaauaaaugcaaucuuugaagaaaaugaaguggauauaucagugguaguacaagauccaaaaaauguguaccaaagaggaacacauccauuuaguaggauaagagauggauuacaauauggauggaaaacauggggaaaaaauuuaguauuuaguccaggaagaaaaaauggaucauuuauaauagaugggaaaagccgaaaagaauguccauuuucaaacagaguauggaacucauuucaaauugaagaauuuggaacaggaguauuuacaacaagaguauauauggaugcaguauuugaauacaccauagauugugauggaaguauauuaggagcagcaguaaaugggaaaaaaagcgcucacggaaguccaacguuuuggaugggaucacacgagguaaauggcacguggaugauacauacuuuagaagcauuagauuacaaagaaugugaauggccauuaacucauacaauagguacaagcguagaagaaagugagauguuuaugccacguucaaucggggggccaguaucaagucauaaccauauaccaggauauaaaguacaaacgaauggaccuuggaugcaaguaccacuagaaguaaaacgagaagcaugcccaggaacgucaguaauaauagauggaaauugugauggcagggguaaaagcacaagaucaacaacagauucaggaaaaguaauaccugaaugguguuguagaaguuguacaaugccaccaguaucauuccauggaagugauggaugcugguauccaauggaaauuagaccaagaaaaacucaugaaagucauuuaguaagaucuuggguaacugcaggagaaauacaugcaguaccauuugguuuaguaaguaugaugauagcaauggaaguaguucuaagaaaaaggcaagggccuaaacaaaugcuagugggaggaguaguauugcuaggugcaauguuaguaggccaaguaaccugaggacuaguaauaaggaaacuguaugaaugucugugggcaggaagugaagagauccuucuguaaagguuuuuggaauuaugucugcugaauaauaaacuuuuuugaaauaauaaaucugguagaaaaaugagaucuaaaaaaaaaaaaaaaaaaaaaaaaaaaaaaaaaaaaaaaaaaaaaaaaaaaaaaaaaaaaaaaaugcaucccccccccccccccccccccccccccccccaaaggcucuuuucagagccaccagaauu

SEQ ID NO: 2409 - RNA, 1508 nt, Artificial Sequence
  mRNA product Design g-4 comprising derived and/or modified sequence from YFV__NC_002031.1__eSS-NS1 (polyprotein: aa758-1130) (opt6)
gggagacuccugucgggcggaaguaggaggaguagaguuuaaaaacaguacucuuuuuccgguucgggacguaguugaagcaacgacaagccggauaaccgcucuugagacaggaagcuuaccaugucaaugaguaugauauuaguagggguaauaaugauguuccuuagcuuaggaguaggagcagaucaaggaugugcaauaaauuuuggaaaaagagaacuaaaaugcggagacgguauauuuauauuuagagauagugaugauuggcuaaauaaauauaguuacuauccagaagauccaguuaaauuagccucaauaguaaaagcuagcuuugaagaaggaaaauguggacuaaauucaguagacagucuagaacacgaaauguggagaucaagggcagaugaaauaaaugcaaucuuugaagaaaaugaaguggauauaucagugguaguacaagauccaaaaaauguguaccaaagaggaacacauccauuuaguaggauaagagauggauuacaauauggauggaaaacauggggaaaaaauuuaguauuuaguccaggaagaaaaaauggaucauuuauaauagaugggaaaagccgaaaagaauguccauuuucaaacagaguauggaacucauuucaaauugaagaauuuggaacaggaguauuuacaacaagaguauauauggaugcaguauuugaauacaccauagauugugauggaaguauauuaggagcagcaguaaaugggaaaaaaagcgcucacggaaguccaacguuuuggaugggaucacacgagguaaauggcacguggaugauacauacuuuagaagcauuagauuacaaagaaugugaauggccauuaacucauacaauagguacaagcguagaagaaagugagauguuuaugccacguucaaucggggggccaguaucaagucauaaccauauaccaggauauaaaguacaaacgaauggaccuuggaugcaaguaccacuagaaguaaaacgagaagcaugcccaggaacgucaguaauaauagauggaaauugugauggcagggguaaaagcacaagaucaacaacagauucaggaaaaguaauaccugaaugguguuguagaaguuguacaaugccaccaguaucauuccauggaagugauggaugcugguauccaauggaaauuagaccaagaaaaacucaugaaagucauuuaguaagaucuuggguaacugcaugaggacuaguaauaaggaaacuguaugaaugucugugggcaggaagugaagagauccuucuguaaagguuuuuggaauuaugucugcugaauaauaaacuuuuuugaaauaauaaaucugguagaaaaaugagaucuaaaaaaaaaaaaaaaaaaaaaaaaaaaaaaaaaaaaaaaaaaaaaaaaaaaaaaaaaaaaaaaaugcaucccccccccccccccccccccccccccccccaaaggcucuuuucagagccaccagaauu

SEQ ID NO: 2410 - RNA, 1499 nt, Artificial Sequence
  mRNA product Design g-4 comprising derived and/or modified sequence from YFV__NC_002031.1__SSIgE-NS1 (polyprotein: aa779-1130) (opt6)
gggagacuccugucgggcggaaguaggaggaguagaguuuaaaaacaguacucuuuuuccgguucgggacguaguugaagcaacgacaagccggauaaccgcucuugagacaggaagcuuaccauggacuggacauggauauuauuuuuaguagcagcagcaacaagaguacauucagaucaaggaugugcaauaaauuuuggaaaaagagaacuaaaaugcggagacgguauauuuauauuuagagauagugaugauuggcuaaauaaauauaguuacuauccagaagauccaguuaaauuagccucaauaguaaaagcuagcuuugaagaaggaaaauguggacuaaauucaguagacagucuagaacacgaaauguggagaucaagggcagaugaaauaaaugcaaucuuugaagaaaaugaaguggauauaucagugguaguacaagauccaaaaaauguguaccaaagaggaacacauccauuuaguaggauaagagauggauuacaauauggauggaaaacauggggaaaaaauuuaguauuuaguccaggaagaaaaaauggaucauuuauaauagaugggaaaagccgaaaagaauguccauuuucaaacagaguauggaacucauuucaaauugaagaauuuggaacaggaguauuuacaacaagaguauauauggaugcaguauuugaauacaccauagauugugauggaaguauauuaggagcagcaguaaaugggaaaaaaagcgcucacggaaguccaacguuuuggaugggaucacacgagguaaauggcacguggaugauacauacuuuagaagcauuagauuacaaagaaugugaauggccauuaacucauacaauagguacaagcguagaagaaagugagauguuuaugccacguucaaucggggggccaguaucaagucauaaccauauaccaggauauaaaguacaaacgaauggaccuuggaugcaaguaccacuagaaguaaaacgagaagcaugcccaggaacgucaguaauaauagauggaaauugugauggcagggguaaaagcacaagaucaacaacagauucaggaaaaguaauaccugaaugguguuguagaaguuguacaaugccaccaguaucauuccauggaagugauggaugcugguauccaauggaaauuagaccaagaaaaacucaugaaagucauuuaguaagaucuuggguaacugcaugaggacuaguaauaaggaaacuguaugaaugucugugggcaggaagugaagagauccuucuguaaagguuuuuggaauuaugucugcugaauaauaaacuuuuuugaaauaauaaaucugguagaaaaaugagaucuaaaaaaaaaaaaaaaaaaaaaaaaaaaaaaaaaaaaaaaaaaaaaaaaaaaaaaaaaaaaaaaaugcaucccccccccccccccccccccccccccccccaaaggcucuuuucagagccaccagaauu

SEQ ID NO: 2411 - RNA, 1649 nt, Artificial Sequence
  mRNA product Design g-4 comprising derived and/or modified sequence from YFV__NC_002031.1__eSS-NS1-Y (polyprotein: aa758-1177) (opt11)
gggagacuccugucgggcggaaguaggaggaguagaguuuaaaaacaguacucuuuuuccgguucgggacguaguugaagcaacgacaagccggauaaccgcucuugagacaggaagcuuaccaugagcaugagcaugaucuugguaggggucauaaugauguucuugagccuagggguaggcgcagaccagggaugcgcgauaaacuucggcaaacgcgaacucaaaugcggggacggaaucuucaucuuucgcgacagugacgacuggcuaaacaaguacaguuacuacccggaagaccccguaaaacuagccucaauaguaaaagcgagcuucgaagaaggaaagugcgggcuaaacagcguggacucccuagagcacgagauguggaggucgagagcggacgagaucaacgccauauucgaagaaaaugaaguagacauaagcguagucguacaagaucccaaaaacguguaccagcgcggaacccaccccuucagcaggaucagagacgggcuacaauacggauggaagacauggggcaaaaaccuggucuucagcccgggcaggaaaaacggaucguucaucaucgauggcaaaagccgaaaggagugcccguucucaaacaggguauggaacucguuccagaucgaagaguucggcacaggcgucuucacgacaagagucuacauggacgcaguguucgaauacacaaucgacugcgacggcuccauacugggcgcagccgugaacgggaaaaagagcgcacacggaagcccgaccuuuuggauggguucgcacgaggugaacggaacauggaugauacacaccuuagaagcacucgauuacaaagaaugcgaauggcccuuaacccacaccaucgguacguccguagaagaaagcgaaauguucaugccgcgcucaaucggcggcccagucucgagccacaaccacaucccgggcuauaaaguacaaacaaacgggccauggaugcagguaccccucgaggucaagcgcgaagccugccccggaaccucggucaucaucgacggcaacugcgacggcaggggaaaaagcacgcgcucaaccacggacucgggaaagguaauaccagaguggugcugcaggagcugcaccaugccaccgguaucguuccacggcucagacggaugcugguacccgauggaaaucagacccagaaaaacgcacgagagccaccucguacgcucauggguaaccgcaggcgagauccacgccgugccauuuggacuggucucaaugaugauagcgauggaggucgugcucaggaagaggcaagggcccaagcaaaugcucguaggaggaguaguacuccugggcgcaaugcuggucggacaggugaccugaggacuaguaauaaggaaacuguaugaaugucugugggcaggaagugaagagauccuucuguaaagguuuuuggaauuaugucugcugaauaauaaacuuuuuugaaauaauaaaucugguagaaaaaugagaucuaaaaaaaaaaaaaaaaaaaaaaaaaaaaaaaaaaaaaaaaaaaaaaaaaaaaaaaaaaaaaaaaugcaucccccccccccccccccccccccccccccccaaaggcucuuuucagagccaccagaauu

SEQ ID NO: 2412 - RNA, 1508 nt, Artificial Sequence
  mRNA product Design g-4 comprising derived and/or modified sequence from YFV__NC_002031.1__eSS-NS1 (polyprotein: aa758-1130) (opt11)
gggagacuccugucgggcggaaguaggaggaguagaguuuaaaaacaguacucuuuuuccgguucgggacguaguugaagcaacgacaagccggauaaccgcucuugagacaggaagcuuaccaugagcaugagcaugaucuugguaggggucauaaugauguucuugagccuagggguaggcgcagaccagggaugcgcgauaaacuucggcaaacgcgaacucaaaugcggggacggaaucuucaucuuucgcgacagugacgacuggcuaaacaaguacaguuacuacccggaagaccccguaaaacuagccucaauaguaaaagcgagcuucgaagaaggaaagugcgggcuaaacagcguggacucccuagagcacgagauguggaggucgagagcggacgagaucaacgccauauucgaagaaaaugaaguagacauaagcguagucguacaagaucccaaaaacguguaccagcgcggaacccaccccuucagcaggaucagagacgggcuacaauacggauggaagacauggggcaaaaaccuggucuucagcccgggcaggaaaaacggaucguucaucaucgauggcaaaagccgaaaggagugcccguucucaaacaggguauggaacucguuccagaucgaagaguucggcacaggcgucuucacgacaagagucuacauggacgcaguguucgaauacacaaucgacugcgacggcuccauacugggcgcagccgugaacgggaaaaagagcgcacacggaagcccgaccuuuuggauggguucgcacgaggugaacggaacauggaugauacacaccuuagaagcacucgauuacaaagaaugcgaauggcccuuaacccacaccaucgguacguccguagaagaaagcgaaauguucaugccgcgcucaaucggcggcccagucucgagccacaaccacaucccgggcuauaaaguacaaacaaacgggccauggaugcagguaccccucgaggucaagcgcgaagccugccccggaaccucggucaucaucgacggcaacugcgacggcaggggaaaaagcacgcgcucaaccacggacucgggaaagguaauaccagaguggugcugcaggagcugcaccaugccaccgguaucguuccacggcucagacggaugcugguacccgauggaaaucagacccagaaaaacgcacgagagccaccucguacgcucauggguaaccgcaugaggacuaguaauaaggaaacuguaugaaugucugugggcaggaagugaagagauccuucuguaaagguuuuuggaauuaugucugcugaauaauaaacuuuuuugaaauaauaaaucugguagaaaaaugagaucuaaaaaaaaaaaaaaaaaaaaaaaaaaaaaaaaaaaaaaaaaaaaaaaaaaaaaaaaaaaaaaaaugcaucccccccccccccccccccccccccccccccaaaggcucuuuucagagccaccagaauu

SEQ ID NO: 2413 - RNA, 1499 nt, Artificial Sequence
  mRNA product Design g-4 comprising derived and/or modified sequence from YFV__NC_002031.1__SSIgE-NS1 (polyprotein: aa779-1130) (opt11)
gggagacuccugucgggcggaaguaggaggaguagaguuuaaaaacaguacucuuuuuccgguucgggacguaguugaagcaacgacaagccggauaaccgcucuugagacaggaagcuuaccauggauuggacguggauacucuuucucguggccgcggccacgcgcgugcacucggaccagggaugcgcgauaaacuucggcaaacgcgaacucaaaugcggggacggaaucuucaucuuucgcgacagugacgacuggcuaaacaaguacaguuacuacccggaagaccccguaaaacuagccucaauaguaaaagcgagcuucgaagaaggaaagugcgggcuaaacagcguggacucccuagagcacgagauguggaggucgagagcggacgagaucaacgccauauucgaagaaaaugaaguagacauaagcguagucguacaagaucccaaaaacguguaccagcgcggaacccaccccuucagcaggaucagagacgggcuacaauacggauggaagacauggggcaaaaaccuggucuucagcccgggcaggaaaaacggaucguucaucaucgauggcaaaagccgaaaggagugcccguucucaaacaggguauggaacucguuccagaucgaagaguucggcacaggcgucuucacgacaagagucuacauggacgcaguguucgaauacacaaucgacugcgacggcuccauacugggcgcagccgugaacgggaaaaagagcgcacacggaagcccgaccuuuuggauggguucgcacgaggugaacggaacauggaugauacacaccuuagaagcacucgauuacaaagaaugcgaauggcccuuaacccacaccaucgguacguccguagaagaaagcgaaauguucaugccgcgcucaaucggcggcccagucucgagccacaaccacaucccgggcuauaaaguacaaacaaacgggccauggaugcagguaccccucgaggucaagcgcgaagccugccccggaaccucggucaucaucgacggcaacugcgacggcaggggaaaaagcacgcgcucaaccacggacucgggaaagguaauaccagaguggugcugcaggagcugcaccaugccaccgguaucguuccacggcucagacggaugcugguacccgauggaaaucagacccagaaaaacgcacgagagccaccucguacgcucauggguaaccgcaugaggacuaguaauaaggaaacuguaugaaugucugugggcaggaagugaagagauccuucuguaaagguuuuuggaauuaugucugcugaauaauaaacuuuuuugaaauaauaaaucugguagaaaaaugagaucuaaaaaaaaaaaaaaaaaaaaaaaaaaaaaaaaaaaaaaaaaaaaaaaaaaaaaaaaaaaaaaaaugcaucccccccccccccccccccccccccccccccaaaggcucuuuucagagccaccagaauu

SEQ ID NO: 2414 - RNA, 1700 nt, Artificial Sequence
  mRNA product Design h-4 comprising derived and/or modified sequence from YFV__NC_002031.1__eSS-NS1-Y (polyprotein: aa758-1177) (wt)
gggagagggcgcuuggcuugcaaggacccugagcugcggcauugaagcacacccaacccaacucgacugaagucagccucacugaaccggaucugagaaucuucucucucugggcuugccagggcucuccgaaccuagcuagcauccucuucaauuccaacuagaaagcuuaccauguccaugagcaugaucuugguaggagugaucaugauguuuuugucucuaggaguuggggcggaucaaggaugcgccaucaacuuuggcaagagagagcucaagugcggagaugguaucuucauauuuagagacucugaugacuggcugaacaaguacucauacuauccagaagauccugugaagcuugcaucaauagugaaagccucuuuugaagaagggaaguguggccuaaauucaguugacucccuugagcaugagauguggagaagcagggcagaugagaucaaugccauuuuugaggaaaacgagguggacauuucuguugucgugcaggauccaaagaauguuuaccagagaggaacucauccauuuuccagaauucgggauggucugcaguaugguuggaagacuugggguaagaaccuuguguucuccccagggaggaagaauggaagcuucaucauagauggaaaguccaggaaagaaugcccguuuucaaaccgggucuggaauucuuuccagauagaggaguuugggacgggaguguucaccacacgcguguacauggacgcagucuuugaauacaccauagacugcgauggaucuaucuugggugcagcggugaacggaaaaaagagugcccauggcucuccaacauuuuggaugggaagucaugaaguaaaugggacauggaugauccacaccuuggaggcauuagauuacaaggagugugaguggccacugacacauacgauuggaacaucaguugaagagagugaaauguucaugccgagaucaaucggaggcccaguuagcucucacaaucauaucccuggauacaagguucagacgaacggaccuuggaugcagguaccacuagaagugaagagagaagcuugcccagggacuagcgugaucauugauggcaacugugauggacggggaaaaucaaccagauccaccacggauagcgggaaaguuauuccugaaugguguugccgcuccugcacaaugccgccugugagcuuccaugguagugauggguguugguaucccauggaaauuaggccaaggaaaacgcaugaaagccaucuggugcgcuccuggguuacagcuggagaaauacaugcugucccuuuugguuuggugagcaugaugauagcaauggaagugguccuaaggaaaagacagggaccaaagcaaauguugguuggaggaguagugcucuugggagcaaugcuggucgggcaaguaacuugaggacuaguaauaaggaaacuguaugaaugucugugggcaggaagugaagagauccuucuguaaagguuuuuggaauuaugucugcugaauaauaaacuuuuuugaaauaauaaaucugguagaaaaaugagaucuaaaaaaaaaaaaaaaaaaaaaaaaaaaaaaaaaaaaaaaaaaaaaaaaaaaaaaaaaaaaaaaaugcaucccccccccccccccccccccccccccccccaaaggcucuuuucagagccaccagaauu

SEQ ID NO: 2415 - RNA, 1559 nt, Artificial Sequence
  mRNA product Design h-4 comprising derived and/or modified sequence from YFV__NC_002031.1__eSS-NS1 (polyprotein: aa758-1130) (wt)
gggagagggcgcuuggcuugcaaggacccugagcugcggcauugaagcacacccaacccaacucgacugaagucagccucacugaaccggaucugagaaucuucucucucugggcuugccagggcucuccgaaccuagcuagcauccucuucaauuccaacuagaaagcuuaccauguccaugagcaugaucuugguaggagugaucaugauguuuuugucucuaggaguuggggcggaucaaggaugcgccaucaacuuuggcaagagagagcucaagugcggagaugguaucuucauauuuagagacucugaugacuggcugaacaaguacucauacuauccagaagauccugugaagcuugcaucaauagugaaagccucuuuugaagaagggaaguguggccuaaauucaguugacucccuugagcaugagauguggagaagcagggcagaugagaucaaugccauuuuugaggaaaacgagguggacauuucuguugucgugcaggauccaaagaauguuuaccagagaggaacucauccauuuuccagaauucgggauggucugcaguaugguuggaagacuugggguaagaaccuuguguucuccccagggaggaagaauggaagcuucaucauagauggaaaguccaggaaagaaugcccguuuucaaaccgggucuggaauucuuuccagauagaggaguuugggacgggaguguucaccacacgcguguacauggacgcagucuuugaauacaccauagacugcgauggaucuaucuugggugcagcggugaacggaaaaaagagugcccauggcucuccaacauuuuggaugggaagucaugaaguaaaugggacauggaugauccacaccuuggaggcauuagauuacaaggagugugaguggccacugacacauacgauuggaacaucaguugaagagagugaaauguucaugccgagaucaaucggaggcccaguuagcucucacaaucauaucccuggauacaagguucagacgaacggaccuuggaugcagguaccacuagaagugaagagagaagcuugcccagggacuagcgugaucauugauggcaacugugauggacggggaaaaucaaccagauccaccacggauagcgggaaaguuauuccugaaugguguugccgcuccugcacaaugccgccugugagcuuccaugguagugauggguguugguaucccauggaaauuaggccaaggaaaacgcaugaaagccaucuggugcgcuccuggguuacagcuugaggacuaguaauaaggaaacuguaugaaugucugugggcaggaagugaagagauccuucuguaaagguuuuuggaauuaugucugcugaauaauaaacuuuuuugaaauaauaaaucugguagaaaaaugagaucuaaaaaaaaaaaaaaaaaaaaaaaaaaaaaaaaaaaaaaaaaaaaaaaaaaaaaaaaaaaaaaaaugcaucccccccccccccccccccccccccccccccaaaggcucuuuucagagccaccagaauu

SEQ ID NO: 2416 - RNA, 1550 nt, Artificial Sequence
  mRNA product Design h-4 comprising derived and/or modified sequence from YFV__NC_002031.1__SSIgE-NS1 (polyprotein: aa779-1130) (wt)
gggagagggcgcuuggcuugcaaggacccugagcugcggcauugaagcacacccaacccaacucgacugaagucagccucacugaaccggaucugagaaucuucucucucugggcuugccagggcucuccgaaccuagcuagcauccucuucaauuccaacuagaaagcuuaccauggacuggaccuggauccuguuccucguggccgccgcgacccgcguccacagcgaucaaggaugcgccaucaacuuuggcaagagagagcucaagugcggagaugguaucuucauauuuagagacucugaugacuggcugaacaaguacucauacuauccagaagauccugugaagcuugcaucaauagugaaagccucuuuugaagaagggaaguguggccuaaauucaguugacucccuugagcaugagauguggagaagcagggcagaugagaucaaugccauuuuugaggaaaacgagguggacauuucuguugucgugcaggauccaaagaauguuuaccagagaggaacucauccauuuuccagaauucgggauggucugcaguaugguuggaagacuugggguaagaaccuuguguucuccccagggaggaagaauggaagcuucaucauagauggaaaguccaggaaagaaugcccguuuucaaaccgggucuggaauucuuuccagauagaggaguuugggacgggaguguucaccacacgcguguacauggacgcagucuuugaauacaccauagacugcgauggaucuaucuugggugcagcggugaacggaaaaaagagugcccauggcucuccaacauuuuggaugggaagucaugaaguaaaugggacauggaugauccacaccuuggaggcauuagauuacaaggagugugaguggccacugacacauacgauuggaacaucaguugaagagagugaaauguucaugccgagaucaaucggaggcccaguuagcucucacaaucauaucccuggauacaagguucagacgaacggaccuuggaugcagguaccacuagaagugaagagagaagcuugcccagggacuagcgugaucauugauggcaacugugauggacggggaaaaucaaccagauccaccacggauagcgggaaaguuauuccugaaugguguugccgcuccugcacaaugccgccugugagcuuccaugguagugauggguguugguaucccauggaaauuaggccaaggaaaacgcaugaaagccaucuggugcgcuccuggguuacagcuugaggacuaguaauaaggaaacuguaugaaugucugugggcaggaagugaagagauccuucuguaaagguuuuuggaauuaugucugcugaauaauaaacuuuuuugaaauaauaaaucugguagaaaaaugagaucuaaaaaaaaaaaaaaaaaaaaaaaaaaaaaaaaaaaaaaaaaaaaaaaaaaaaaaaaaaaaaaaaugcaucccccccccccccccccccccccccccccccaaaggcucuuuucagagccaccagaauu

SEQ ID NO: 2417 - RNA, 1700 nt, Artificial Sequence
  mRNA product Design h-4 comprising derived and/or modified sequence from YFV__NC_002031.1__eSS-NS1-Y (polyprotein: aa758-1177) (opt1)
gggagagggcgcuuggcuugcaaggacccugagcugcggcauugaagcacacccaacccaacucgacugaagucagccucacugaaccggaucugagaaucuucucucucugggcuugccagggcucuccgaaccuagcuagcauccucuucaauuccaacuagaaagcuuaccaugagcauguccaugauccuggugggcgucaucaugauguuccucagccugggggugggcgccgaccaggggugcgccaucaacuucggcaagcgcgagcugaagugcggggacggcaucuucaucuuccgggacuccgacgacuggcucaacaaguacagcuacuaccccgaggacccggugaagcuggcguccaucgucaaggccagcuucgaggagggcaagugcgggcugaacuccguggacagccucgagcacgagauguggcgcucccgggccgacgagaucaacgccaucuucgaggagaacgagguggacaucagcgucguggugcaggaccccaagaacgucuaccagcgcggcacccaccccuucucccggauccgcgacgggcugcaguacggcuggaagaccugggggaagaaccugguguucagccccggccggaagaacggcuccuucaucaucgacggcaagagccgcaaggagugcccguucuccaaccggguguggaacagcuuccagaucgaggaguucgggacgggggucuucaccacccgcguguacauggacgccguguucgaguacaccaucgacugcgacggcuccauccucggcgcggccgucaacgggaagaaguccgcccacggcagccccacguucuggauggggagccacgaggugaacggcaccuggaugauccacacccuggaggcccuggacuacaaggagugcgaguggccccucacccacacgaucgggaccagcguggaggaguccgagauguucaugccccggagcaucggcggcccggucuccagccacaaccacauccccggguacaaggugcagaccaacggccccuggaugcaggucccccuggaggugaagcgcgaggcgugcccggggaccuccgugaucaucgacggcaacugcgacgggcggggcaagagcacgcgcuccaccaccgacagcggcaaggugauccccgaguggugcugccgguccugcaccaugccgcccgucagcuuccacggguccgacggcugcugguaccccauggagauccgcccccggaagacgcacgagagccaccuggugcgcuccugggucaccgccggggagauccacgccgugcccuucggccucgugagcaugaugaucgccauggaggucgugcugcggaagcgccaggggcccaagcagaugcuggugggcggcgucgugcuccugggggccaugcuggugggccaggucaccugaggacuaguaauaaggaaacuguaugaaugucugugggcaggaagugaagagauccuucuguaaagguuuuuggaauuaugucugcugaauaauaaacuuuuuugaaauaauaaaucugguagaaaaaugagaucuaaaaaaaaaaaaaaaaaaaaaaaaaaaaaaaaaaaaaaaaaaaaaaaaaaaaaaaaaaaaaaaaugcaucccccccccccccccccccccccccccccccaaaggcucuuuucagagccaccagaauu

SEQ ID NO: 2418 - RNA, 1559 nt, Artificial Sequence
  mRNA product Design h-4 comprising derived and/or modified sequence from YFV__NC_002031.1__eSS-NS1 (polyprotein: aa758-1130) (opt1)
gggagagggcgcuuggcuugcaaggacccugagcugcggcauugaagcacacccaacccaacucgacugaagucagccucacugaaccggaucugagaaucuucucucucugggcuugccagggcucuccgaaccuagcuagcauccucuucaauuccaacuagaaagcuuaccaugagcauguccaugauccuggugggcgucaucaugauguuccucagccugggggugggcgccgaccaggggugcgccaucaacuucggcaagcgcgagcugaagugcggggacggcaucuucaucuuccgggacuccgacgacuggcucaacaaguacagcuacuaccccgaggacccggugaagcuggcguccaucgucaaggccagcuucgaggagggcaagugcgggcugaacuccguggacagccucgagcacgagauguggcgcucccgggccgacgagaucaacgccaucuucgaggagaacgagguggacaucagcgucguggugcaggaccccaagaacgucuaccagcgcggcacccaccccuucucccggauccgcgacgggcugcaguacggcuggaagaccugggggaagaaccugguguucagccccggccggaagaacggcuccuucaucaucgacggcaagagccgcaaggagugcccguucuccaaccggguguggaacagcuuccagaucgaggaguucgggacgggggucuucaccacccgcguguacauggacgccguguucgaguacaccaucgacugcgacggcuccauccucggcgcggccgucaacgggaagaaguccgcccacggcagccccacguucuggauggggagccacgaggugaacggcaccuggaugauccacacccuggaggcccuggacuacaaggagugcgaguggccccucacccacacgaucgggaccagcguggaggaguccgagauguucaugccccggagcaucggcggcccggucuccagccacaaccacauccccggguacaaggugcagaccaacggccccuggaugcaggucccccuggaggugaagcgcgaggcgugcccggggaccuccgugaucaucgacggcaacugcgacgggcggggcaagagcacgcgcuccaccaccgacagcggcaaggugauccccgaguggugcugccgguccugcaccaugccgcccgucagcuuccacggguccgacggcugcugguaccccauggagauccgcccccggaagacgcacgagagccaccuggugcgcuccugggucaccgccugaggacuaguaauaaggaaacuguaugaaugucugugggcaggaagugaagagauccuucuguaaagguuuuuggaauuaugucugcugaauaauaaacuuuuuugaaauaauaaaucugguagaaaaaugagaucuaaaaaaaaaaaaaaaaaaaaaaaaaaaaaaaaaaaaaaaaaaaaaaaaaaaaaaaaaaaaaaaaugcaucccccccccccccccccccccccccccccccaaaggcucuuuucagagccaccagaauu

SEQ ID NO: 2419 - RNA, 1550 nt, Artificial Sequence
  mRNA product Design h-4 comprising derived and/or modified sequence from YFV__NC_002031.1__SSIgE-NS1 (polyprotein: aa779-1130) (opt1)
gggagagggcgcuuggcuugcaaggacccugagcugcggcauugaagcacacccaacccaacucgacugaagucagccucacugaaccggaucugagaaucuucucucucugggcuugccagggcucuccgaaccuagcuagcauccucuucaauuccaacuagaaagcuuaccauggacuggaccuggauccuguuccucguggccgccgcgacccgcguccacagcgaccaggggugcgccaucaacuucggcaagcgcgagcugaagugcggggacggcaucuucaucuuccgggacuccgacgacuggcucaacaaguacagcuacuaccccgaggacccggugaagcuggcguccaucgucaaggccagcuucgaggagggcaagugcgggcugaacuccguggacagccucgagcacgagauguggcgcucccgggccgacgagaucaacgccaucuucgaggagaacgagguggacaucagcgucguggugcaggaccccaagaacgucuaccagcgcggcacccaccccuucucccggauccgcgacgggcugcaguacggcuggaagaccugggggaagaaccugguguucagccccggccggaagaacggcuccuucaucaucgacggcaagagccgcaaggagugcccguucuccaaccggguguggaacagcuuccagaucgaggaguucgggacgggggucuucaccacccgcguguacauggacgccguguucgaguacaccaucgacugcgacggcuccauccucggcgcggccgucaacgggaagaaguccgcccacggcagccccacguucuggauggggagccacgaggugaacggcaccuggaugauccacacccuggaggcccuggacuacaaggagugcgaguggccccucacccacacgaucgggaccagcguggaggaguccgagauguucaugccccggagcaucggcggcccggucuccagccacaaccacauccccggguacaaggugcagaccaacggccccuggaugcaggucccccuggaggugaagcgcgaggcgugcccggggaccuccgugaucaucgacggcaacugcgacgggcggggcaagagcacgcgcuccaccaccgacagcggcaaggugauccccgaguggugcugccgguccugcaccaugccgcccgucagcuuccacggguccgacggcugcugguaccccauggagauccgcccccggaagacgcacgagagccaccuggugcgcuccugggucaccgccugaggacuaguaauaaggaaacuguaugaaugucugugggcaggaagugaagagauccuucuguaaagguuuuuggaauuaugucugcugaauaauaaacuuuuuugaaauaauaaaucugguagaaaaaugagaucuaaaaaaaaaaaaaaaaaaaaaaaaaaaaaaaaaaaaaaaaaaaaaaaaaaaaaaaaaaaaaaaaugcaucccccccccccccccccccccccccccccccaaaggcucuuuucagagccaccagaauu

SEQ ID NO: 2420 - RNA, 1700 nt, Artificial Sequence
  mRNA product Design h-4 comprising derived and/or modified sequence from YFV__NC_002031.1__eSS-NS1-Y (polyprotein: aa758-1177) (opt2)
gggagagggcgcuuggcuugcaaggacccugagcugcggcauugaagcacacccaacccaacucgacugaagucagccucacugaaccggaucugagaaucuucucucucugggcuugccagggcucuccgaaccuagcuagcauccucuucaauuccaacuagaaagcuuaccauguccauguccaugauccucgucggcgucaucaugauguuccucucccucggcgucggcgccgaccagggcugcgccaucaacuucggcaagcgcgagcucaagugcggcgacggcaucuucaucuuccgcgacuccgacgacuggcucaacaaguacuccuacuaccccgaggaccccgucaagcucgccuccaucgucaaggccuccuucgaggagggcaagugcggccucaacuccgucgacucccucgagcacgagauguggcgcucccgcgccgacgagaucaacgccaucuucgaggagaacgaggucgacaucuccgucgucguccaggaccccaagaacgucuaccagcgcggcacccaccccuucucccgcauccgcgacggccuccaguacggcuggaagaccuggggcaagaaccucgucuucucccccggccgcaagaacggcuccuucaucaucgacggcaagucccgcaaggagugccccuucuccaaccgcgucuggaacuccuuccagaucgaggaguucggcaccggcgucuucaccacccgcgucuacauggacgccgucuucgaguacaccaucgacugcgacggcuccauccucggcgccgccgucaacggcaagaaguccgcccacggcucccccaccuucuggaugggcucccacgaggucaacggcaccuggaugauccacacccucgaggcccucgacuacaaggagugcgaguggccccucacccacaccaucggcaccuccgucgaggaguccgagauguucaugccccgcuccaucggcggccccgucuccucccacaaccacauccccggcuacaagguccagaccaacggccccuggaugcaggucccccucgaggucaagcgcgaggccugccccggcaccuccgucaucaucgacggcaacugcgacggccgcggcaaguccacccgcuccaccaccgacuccggcaaggucauccccgaguggugcugccgcuccugcaccaugccccccgucuccuuccacggcuccgacggcugcugguaccccauggagauccgcccccgcaagacccacgagucccaccucguccgcuccugggucaccgccggcgagauccacgccguccccuucggccucgucuccaugaugaucgccauggaggucguccuccgcaagcgccagggccccaagcagaugcucgucggcggcgucguccuccucggcgccaugcucgucggccaggucaccugaggacuaguaauaaggaaacuguaugaaugucugugggcaggaagugaagagauccuucuguaaagguuuuuggaauuaugucugcugaauaauaaacuuuuuugaaauaauaaaucugguagaaaaaugagaucuaaaaaaaaaaaaaaaaaaaaaaaaaaaaaaaaaaaaaaaaaaaaaaaaaaaaaaaaaaaaaaaaugcaucccccccccccccccccccccccccccccccaaaggcucuuuucagagccaccagaauu

SEQ ID NO: 2421 - RNA, 1559 nt, Artificial Sequence
  mRNA product Design h-4 comprising derived and/or modified sequence from YFV__NC_002031.1__eSS-NS1 (polyprotein: aa758-1130) (opt2)
gggagagggcgcuuggcuugcaaggacccugagcugcggcauugaagcacacccaacccaacucgacugaagucagccucacugaaccggaucugagaaucuucucucucugggcuugccagggcucuccgaaccuagcuagcauccucuucaauuccaacuagaaagcuuaccauguccauguccaugauccucgucggcgucaucaugauguuccucucccucggcgucggcgccgaccagggcugcgccaucaacuucggcaagcgcgagcucaagugcggcgacggcaucuucaucuuccgcgacuccgacgacuggcucaacaaguacuccuacuaccccgaggaccccgucaagcucgccuccaucgucaaggccuccuucgaggagggcaagugcggccucaacuccgucgacucccucgagcacgagauguggcgcucccgcgccgacgagaucaacgccaucuucgaggagaacgaggucgacaucuccgucgucguccaggaccccaagaacgucuaccagcgcggcacccaccccuucucccgcauccgcgacggccuccaguacggcuggaagaccuggggcaagaaccucgucuucucccccggccgcaagaacggcuccuucaucaucgacggcaagucccgcaaggagugccccuucuccaaccgcgucuggaacuccuuccagaucgaggaguucggcaccggcgucuucaccacccgcgucuacauggacgccgucuucgaguacaccaucgacugcgacggcuccauccucggcgccgccgucaacggcaagaaguccgcccacggcucccccaccuucuggaugggcucccacgaggucaacggcaccuggaugauccacacccucgaggcccucgacuacaaggagugcgaguggccccucacccacaccaucggcaccuccgucgaggaguccgagauguucaugccccgcuccaucggcggccccgucuccucccacaaccacauccccggcuacaagguccagaccaacggccccuggaugcaggucccccucgaggucaagcgcgaggccugccccggcaccuccgucaucaucgacggcaacugcgacggccgcggcaaguccacccgcuccaccaccgacuccggcaaggucauccccgaguggugcugccgcuccugcaccaugccccccgucuccuuccacggcuccgacggcugcugguaccccauggagauccgcccccgcaagacccacgagucccaccucguccgcuccugggucaccgccugaggacuaguaauaaggaaacuguaugaaugucugugggcaggaagugaagagauccuucuguaaagguuuuuggaauuaugucugcugaauaauaaacuuuuuugaaauaauaaaucugguagaaaaaugagaucuaaaaaaaaaaaaaaaaaaaaaaaaaaaaaaaaaaaaaaaaaaaaaaaaaaaaaaaaaaaaaaaaugcaucccccccccccccccccccccccccccccccaaaggcucuuuucagagccaccagaauu

SEQ ID NO: 2422 - RNA, 1550 nt, Artificial Sequence
  mRNA product Design h-4 comprising derived and/or modified sequence from YFV__NC_002031.1__SSIgE-NS1 (polyprotein: aa779-1130) (opt2)
gggagagggcgcuuggcuugcaaggacccugagcugcggcauugaagcacacccaacccaacucgacugaagucagccucacugaaccggaucugagaaucuucucucucugggcuugccagggcucuccgaaccuagcuagcauccucuucaauuccaacuagaaagcuuaccauggacuggaccuggauccucuuccucgucgccgccgccacccgcguccacuccgaccagggcugcgccaucaacuucggcaagcgcgagcucaagugcggcgacggcaucuucaucuuccgcgacuccgacgacuggcucaacaaguacuccuacuaccccgaggaccccgucaagcucgccuccaucgucaaggccuccuucgaggagggcaagugcggccucaacuccgucgacucccucgagcacgagauguggcgcucccgcgccgacgagaucaacgccaucuucgaggagaacgaggucgacaucuccgucgucguccaggaccccaagaacgucuaccagcgcggcacccaccccuucucccgcauccgcgacggccuccaguacggcuggaagaccuggggcaagaaccucgucuucucccccggccgcaagaacggcuccuucaucaucgacggcaagucccgcaaggagugccccuucuccaaccgcgucuggaacuccuuccagaucgaggaguucggcaccggcgucuucaccacccgcgucuacauggacgccgucuucgaguacaccaucgacugcgacggcuccauccucggcgccgccgucaacggcaagaaguccgcccacggcucccccaccuucuggaugggcucccacgaggucaacggcaccuggaugauccacacccucgaggcccucgacuacaaggagugcgaguggccccucacccacaccaucggcaccuccgucgaggaguccgagauguucaugccccgcuccaucggcggccccgucuccucccacaaccacauccccggcuacaagguccagaccaacggccccuggaugcaggucccccucgaggucaagcgcgaggccugccccggcaccuccgucaucaucgacggcaacugcgacggccgcggcaaguccacccgcuccaccaccgacuccggcaaggucauccccgaguggugcugccgcuccugcaccaugccccccgucuccuuccacggcuccgacggcugcugguaccccauggagauccgcccccgcaagacccacgagucccaccucguccgcuccugggucaccgccugaggacuaguaauaaggaaacuguaugaaugucugugggcaggaagugaagagauccuucuguaaagguuuuuggaauuaugucugcugaauaauaaacuuuuuugaaauaauaaaucugguagaaaaaugagaucuaaaaaaaaaaaaaaaaaaaaaaaaaaaaaaaaaaaaaaaaaaaaaaaaaaaaaaaaaaaaaaaaugcaucccccccccccccccccccccccccccccccaaaggcucuuuucagagccaccagaauu

SEQ ID NO: 2423 - RNA, 1700 nt, Artificial Sequence
  mRNA product Design h-4 comprising derived and/or modified sequence from YFV__NC_002031.1__eSS-NS1-Y (polyprotein: aa758-1177) (opt3)
gggagagggcgcuuggcuugcaaggacccugagcugcggcauugaagcacacccaacccaacucgacugaagucagccucacugaaccggaucugagaaucuucucucucugggcuugccagggcucuccgaaccuagcuagcauccucuucaauuccaacuagaaagcuuaccaugagcauguccaugauccuggugggcgucauuaugauguuccucucucuugggguuggagccgaccaggguugcgcuauaaacuuuggcaagagagagcugaaauguggggauggaaucuucauuuuuagggacucagaugacugguugaauaaguacaguuauuaccccgaagauccugugaaauuagcaagcaucguaaaggccuccuucgaggaaggcaaaugcggucugaacucuguggacucgcuagagcacgaaauguggcggucacgcgcggaugagauuaaugcuaucuuugaggaaaacgaggucgacauaagcgugguugugcaagauccaaagaaugucuaucagcgagggacccauccguucagucguaucagagacggacuccaguacggcuggaagacauggggcaaaaaccugguguuuucccccgggaggaagaauggaucuuucauuaucgaugguaaaagccggaaggaauguccuuuuuccaaccgcguauggaacucauuccagauugaggaguuuggcacugggguuuucacgaccagaguguauauggacgccgucuuugaauacacaaucgauugcgacggaaguauacuuggcgcagccgugaaugguaaaaagagcgcucacgggucuccaacuuucuggaugggaucccaugaggugaauggcaccuggaugauucacacacuggaagcauuggacuauaaggagugugaauggccccucacccauacuaucggcacaucagucgaggagagcgaaauguucaugccuaggaguauugggggaccaguuucuucccacaaccacauccccgguuacaaagugcaaaccaauggcccuuggaugcagguaccacuggaggugaagcgggaagccugcccggggacgagcgucaucauugauggaaacugugacggccgcgguaaaucgacucgaucuaccacagauuccgggaaggugauacccgaguggugcuguagaucaugcacuaugccuccaguuaguuuucauggcagcgacggauguugguaccccauggaaaucaggccucggaaaacccacgagucccaucuggugcguucuugggucacagcuggcgagauucacgccgugccauucgggcucguaagcaugaugaucgcgauggaaguuguguuacgcaagagacagggacccaaacagaugcuggucgguggcgugguccuuuugggggcaaugcuggugggacaaguuaccugaggacuaguaauaaggaaacuguaugaaugucugugggcaggaagugaagagauccuucuguaaagguuuuuggaauuaugucugcugaauaauaaacuuuuuugaaauaauaaaucugguagaaaaaugagaucuaaaaaaaaaaaaaaaaaaaaaaaaaaaaaaaaaaaaaaaaaaaaaaaaaaaaaaaaaaaaaaaaugcaucccccccccccccccccccccccccccccccaaaggcucuuuucagagccaccagaauu

SEQ ID NO: 2424 - RNA, 1559 nt, Artificial Sequence
  mRNA product Design h-4 comprising derived and/or modified sequence from YFV__NC_002031.1__eSS-NS1 (polyprotein: aa758-1130) (opt3)
gggagagggcgcuuggcuugcaaggacccugagcugcggcauugaagcacacccaacccaacucgacugaagucagccucacugaaccggaucugagaaucuucucucucugggcuugccagggcucuccgaaccuagcuagcauccucuucaauuccaacuagaaagcuuaccaugagcauguccaugauccuggugggcgucauuaugauguuccucucucuugggguuggagccgaccaggguugcgcuauaaacuuuggcaagagagagcugaaauguggggauggaaucuucauuuuuagggacucagaugacugguugaauaaguacaguuauuaccccgaagauccugugaaauuagcaagcaucguaaaggccuccuucgaggaaggcaaaugcggucugaacucuguggacucgcuagagcacgaaauguggcggucacgcgcggaugagauuaaugcuaucuuugaggaaaacgaggucgacauaagcgugguugugcaagauccaaagaaugucuaucagcgagggacccauccguucagucguaucagagacggacuccaguacggcuggaagacauggggcaaaaaccugguguuuucccccgggaggaagaauggaucuuucauuaucgaugguaaaagccggaaggaauguccuuuuuccaaccgcguauggaacucauuccagauugaggaguuuggcacugggguuuucacgaccagaguguauauggacgccgucuuugaauacacaaucgauugcgacggaaguauacuuggcgcagccgugaaugguaaaaagagcgcucacgggucuccaacuuucuggaugggaucccaugaggugaauggcaccuggaugauucacacacuggaagcauuggacuauaaggagugugaauggccccucacccauacuaucggcacaucagucgaggagagcgaaauguucaugccuaggaguauugggggaccaguuucuucccacaaccacauccccgguuacaaagugcaaaccaauggcccuuggaugcagguaccacuggaggugaagcgggaagccugcccggggacgagcgucaucauugauggaaacugugacggccgcgguaaaucgacucgaucuaccacagauuccgggaaggugauacccgaguggugcuguagaucaugcacuaugccuccaguuaguuuucauggcagcgacggauguugguaccccauggaaaucaggccucggaaaacccacgagucccaucuggugcguucuugggucacagcuugaggacuaguaauaaggaaacuguaugaaugucugugggcaggaagugaagagauccuucuguaaagguuuuuggaauuaugucugcugaauaauaaacuuuuuugaaauaauaaaucugguagaaaaaugagaucuaaaaaaaaaaaaaaaaaaaaaaaaaaaaaaaaaaaaaaaaaaaaaaaaaaaaaaaaaaaaaaaaugcaucccccccccccccccccccccccccccccccaaaggcucuuuucagagccaccagaauu

SEQ ID NO: 2425 - RNA, 1550 nt, Artificial Sequence
  mRNA product Design h-4 comprising derived and/or modified sequence from YFV__NC_002031.1__SSIgE-NS1 (polyprotein: aa779-1130) (opt3)
gggagagggcgcuuggcuugcaaggacccugagcugcggcauugaagcacacccaacccaacucgacugaagucagccucacugaaccggaucugagaaucuucucucucugggcuugccagggcucuccgaaccuagcuagcauccucuucaauuccaacuagaaagcuuaccauggacuggaccuggauccuguuccucguggccgcugcaacaagaguccacagcgaccaggguugcgcuauaaacuuuggcaagagagagcugaaauguggggauggaaucuucauuuuuagggacucagaugacugguugaauaaguacaguuauuaccccgaagauccugugaaauuagcaagcaucguaaaggccuccuucgaggaaggcaaaugcggucugaacucuguggacucgcuagagcacgaaauguggcggucacgcgcggaugagauuaaugcuaucuuugaggaaaacgaggucgacauaagcgugguugugcaagauccaaagaaugucuaucagcgagggacccauccguucagucguaucagagacggacuccaguacggcuggaagacauggggcaaaaaccugguguuuucccccgggaggaagaauggaucuuucauuaucgaugguaaaagccggaaggaauguccuuuuuccaaccgcguauggaacucauuccagauugaggaguuuggcacugggguuuucacgaccagaguguauauggacgccgucuuugaauacacaaucgauugcgacggaaguauacuuggcgcagccgugaaugguaaaaagagcgcucacgggucuccaacuuucuggaugggaucccaugaggugaauggcaccuggaugauucacacacuggaagcauuggacuauaaggagugugaauggccccucacccauacuaucggcacaucagucgaggagagcgaaauguucaugccuaggaguauugggggaccaguuucuucccacaaccacauccccgguuacaaagugcaaaccaauggcccuuggaugcagguaccacuggaggugaagcgggaagccugcccggggacgagcgucaucauugauggaaacugugacggccgcgguaaaucgacucgaucuaccacagauuccgggaaggugauacccgaguggugcuguagaucaugcacuaugccuccaguuaguuuucauggcagcgacggauguugguaccccauggaaaucaggccucggaaaacccacgagucccaucuggugcguucuugggucacagcuugaggacuaguaauaaggaaacuguaugaaugucugugggcaggaagugaagagauccuucuguaaagguuuuuggaauuaugucugcugaauaauaaacuuuuuugaaauaauaaaucugguagaaaaaugagaucuaaaaaaaaaaaaaaaaaaaaaaaaaaaaaaaaaaaaaaaaaaaaaaaaaaaaaaaaaaaaaaaaugcaucccccccccccccccccccccccccccccccaaaggcucuuuucagagccaccagaauu

SEQ ID NO: 2426 - RNA, 1700 nt, Artificial Sequence
  mRNA product Design h-4 comprising derived and/or modified sequence from YFV__NC_002031.1__eSS-NS1-Y (polyprotein: aa758-1177) (opt4)
gggagagggcgcuuggcuugcaaggacccugagcugcggcauugaagcacacccaacccaacucgacugaagucagccucacugaaccggaucugagaaucuucucucucugggcuugccagggcucuccgaaccuagcuagcauccucuucaauuccaacuagaaagcuuaccaugagcaugagcaugauccuggugggcgugaucaugauguuccugagccugggcgugggcgccgaccagggcugcgccaucaacuucggcaagagagagcugaagugcggcgacggcaucuucaucuucagagacagcgacgacuggcugaacaaguacagcuacuaccccgaggaccccgugaagcuggccagcaucgugaaggccagcuucgaggagggcaagugcggccugaacagcguggacagccuggagcacgagauguggagaagcagagccgacgagaucaacgccaucuucgaggagaacgagguggacaucagcgugguggugcaggaccccaagaacguguaccagagaggcacccaccccuucagcagaaucagagacggccugcaguacggcuggaagaccuggggcaagaaccugguguucagccccggcagaaagaacggcagcuucaucaucgacggcaagagcagaaaggagugccccuucagcaacagaguguggaacagcuuccagaucgaggaguucggcaccggcguguucaccaccagaguguacauggacgccguguucgaguacaccaucgacugcgacggcagcauccugggcgccgccgugaacggcaagaagagcgcccacggcagccccaccuucuggaugggcagccacgaggugaacggcaccuggaugauccacacccuggaggcccuggacuacaaggagugcgaguggccccugacccacaccaucggcaccagcguggaggagagcgagauguucaugcccagaagcaucggcggccccgugagcagccacaaccacauccccggcuacaaggugcagaccaacggccccuggaugcaggugccccuggaggugaagagagaggccugccccggcaccagcgugaucaucgacggcaacugcgacggcagaggcaagagcaccagaagcaccaccgacagcggcaaggugauccccgaguggugcugcagaagcugcaccaugccccccgugagcuuccacggcagcgacggcugcugguaccccauggagaucagacccagaaagacccacgagagccaccuggugagaagcugggugaccgccggcgagauccacgccgugcccuucggccuggugagcaugaugaucgccauggagguggugcugagaaagagacagggccccaagcagaugcuggugggcggcguggugcugcugggcgccaugcuggugggccaggugaccugaggacuaguaauaaggaaacuguaugaaugucugugggcaggaagugaagagauccuucuguaaagguuuuuggaauuaugucugcugaauaauaaacuuuuuugaaauaauaaaucugguagaaaaaugagaucuaaaaaaaaaaaaaaaaaaaaaaaaaaaaaaaaaaaaaaaaaaaaaaaaaaaaaaaaaaaaaaaaugcaucccccccccccccccccccccccccccccccaaaggcucuuuucagagccaccagaauu

SEQ ID NO: 2427 - RNA, 1559 nt, Artificial Sequence
  mRNA product Design h-4 comprising derived and/or modified sequence from YFV__NC_002031.1__eSS-NS1 (polyprotein: aa758-1130) (opt4)
gggagagggcgcuuggcuugcaaggacccugagcugcggcauugaagcacacccaacccaacucgacugaagucagccucacugaaccggaucugagaaucuucucucucugggcuugccagggcucuccgaaccuagcuagcauccucuucaauuccaacuagaaagcuuaccaugagcaugagcaugauccuggugggcgugaucaugauguuccugagccugggcgugggcgccgaccagggcugcgccaucaacuucggcaagagagagcugaagugcggcgacggcaucuucaucuucagagacagcgacgacuggcugaacaaguacagcuacuaccccgaggaccccgugaagcuggccagcaucgugaaggccagcuucgaggagggcaagugcggccugaacagcguggacagccuggagcacgagauguggagaagcagagccgacgagaucaacgccaucuucgaggagaacgagguggacaucagcgugguggugcaggaccccaagaacguguaccagagaggcacccaccccuucagcagaaucagagacggccugcaguacggcuggaagaccuggggcaagaaccugguguucagccccggcagaaagaacggcagcuucaucaucgacggcaagagcagaaaggagugccccuucagcaacagaguguggaacagcuuccagaucgaggaguucggcaccggcguguucaccaccagaguguacauggacgccguguucgaguacaccaucgacugcgacggcagcauccugggcgccgccgugaacggcaagaagagcgcccacggcagccccaccuucuggaugggcagccacgaggugaacggcaccuggaugauccacacccuggaggcccuggacuacaaggagugcgaguggccccugacccacaccaucggcaccagcguggaggagagcgagauguucaugcccagaagcaucggcggccccgugagcagccacaaccacauccccggcuacaaggugcagaccaacggccccuggaugcaggugccccuggaggugaagagagaggccugccccggcaccagcgugaucaucgacggcaacugcgacggcagaggcaagagcaccagaagcaccaccgacagcggcaaggugauccccgaguggugcugcagaagcugcaccaugccccccgugagcuuccacggcagcgacggcugcugguaccccauggagaucagacccagaaagacccacgagagccaccuggugagaagcugggugaccgccugaggacuaguaauaaggaaacuguaugaaugucugugggcaggaagugaagagauccuucuguaaagguuuuuggaauuaugucugcugaauaauaaacuuuuuugaaauaauaaaucugguagaaaaaugagaucuaaaaaaaaaaaaaaaaaaaaaaaaaaaaaaaaaaaaaaaaaaaaaaaaaaaaaaaaaaaaaaaaugcaucccccccccccccccccccccccccccccccaaaggcucuuuucagagccaccagaauu

SEQ ID NO: 2428 - RNA, 1550 nt, Artificial Sequence
  mRNA product Design h-4 comprising derived and/or modified sequence from YFV__NC_002031.1__SSIgE-NS1 (polyprotein: aa779-1130) (opt4)
gggagagggcgcuuggcuugcaaggacccugagcugcggcauugaagcacacccaacccaacucgacugaagucagccucacugaaccggaucugagaaucuucucucucugggcuugccagggcucuccgaaccuagcuagcauccucuucaauuccaacuagaaagcuuaccauggacuggaccuggauccuguuccugguggccgccgccaccagagugcacagcgaccagggcugcgccaucaacuucggcaagagagagcugaagugcggcgacggcaucuucaucuucagagacagcgacgacuggcugaacaaguacagcuacuaccccgaggaccccgugaagcuggccagcaucgugaaggccagcuucgaggagggcaagugcggccugaacagcguggacagccuggagcacgagauguggagaagcagagccgacgagaucaacgccaucuucgaggagaacgagguggacaucagcgugguggugcaggaccccaagaacguguaccagagaggcacccaccccuucagcagaaucagagacggccugcaguacggcuggaagaccuggggcaagaaccugguguucagccccggcagaaagaacggcagcuucaucaucgacggcaagagcagaaaggagugccccuucagcaacagaguguggaacagcuuccagaucgaggaguucggcaccggcguguucaccaccagaguguacauggacgccguguucgaguacaccaucgacugcgacggcagcauccugggcgccgccgugaacggcaagaagagcgcccacggcagccccaccuucuggaugggcagccacgaggugaacggcaccuggaugauccacacccuggaggcccuggacuacaaggagugcgaguggccccugacccacaccaucggcaccagcguggaggagagcgagauguucaugcccagaagcaucggcggccccgugagcagccacaaccacauccccggcuacaaggugcagaccaacggccccuggaugcaggugccccuggaggugaagagagaggccugccccggcaccagcgugaucaucgacggcaacugcgacggcagaggcaagagcaccagaagcaccaccgacagcggcaaggugauccccgaguggugcugcagaagcugcaccaugccccccgugagcuuccacggcagcgacggcugcugguaccccauggagaucagacccagaaagacccacgagagccaccuggugagaagcugggugaccgccugaggacuaguaauaaggaaacuguaugaaugucugugggcaggaagugaagagauccuucuguaaagguuuuuggaauuaugucugcugaauaauaaacuuuuuugaaauaauaaaucugguagaaaaaugagaucuaaaaaaaaaaaaaaaaaaaaaaaaaaaaaaaaaaaaaaaaaaaaaaaaaaaaaaaaaaaaaaaaugcaucccccccccccccccccccccccccccccccaaaggcucuuuucagagccaccagaauu

SEQ ID NO: 2429 - RNA, 1700 nt, Artificial Sequence
  mRNA product Design h-4 comprising derived and/or modified sequence from YFV__NC_002031.1__eSS-NS1-Y (polyprotein: aa758-1177) (opt5)
gggagagggcgcuuggcuugcaaggacccugagcugcggcauugaagcacacccaacccaacucgacugaagucagccucacugaaccggaucugagaaucuucucucucugggcuugccagggcucuccgaaccuagcuagcauccucuucaauuccaacuagaaagcuuaccaugagcauguccaugauccuggugggcgucauuaugauguuccucucucuggggguuggagccgaccagggcugcgcuaucaacuuugggaagagagagcuuaaauguggagauggcauuuucaucuuucgggacagcgaugacuggcugaauaaguacuccuauuaccccgaagauccugugaaacucgccucuauugugaaggcgagcuucgaggaagggaaaugcggacugaacuccgucgacucucuugagcacgaaauguggcgcagcagagcugaugagaucaaugccaucuuugaggaaaacgagguggacauuuccguugugguccaagauccgaagaauguguaucagcggggcacccaucccuucagccgcaucagagacggccugcaguacggguggaagacauggggcaaaaaccucguguuuucuccuggacggaagaauggguccuucauuaucgauggaaaaagccgcaaggaaugucccuuuucuaacagaguguggaacuccuuccagauugaggaguuuggcacgggggucuucaccacacggguguauauggacgccguguuugaauacaccaucgauugcgacggaagcauucugggcgcugccgucaauggcaaaaagucugcucacggguccccuacauucuggaugggaagccaugagguuaauggcaccuggaugauccacacacuggaagcccucgacuauaaggagugugaauggccccugacccauacgaucgggaccuccguggaggagucugaaauguucaugccucgcagcauuggaggcccgguguccagccacaaccacauccccggguacaaaguccaaacaaauggaccuuggaugcagguuccccuugagguuaagagagaagcgugcccuggcaccucugugauuaucgauggcaacugugacgggcggggaaaauccacacgcagcaccacggauucuggcaaggucauucccgaguggugcuguagaagcugcacaaugccgccuguguccuuucaugggucugacggauguugguaccccauggaaauccggccucgcaaaacccacgagagccaucugguuagauccugggugacagccggcgagauccacgcuguccccuucgggcucgugagcaugaugauugccauggaagucgugcugcggaagagacagggccccaaacagaugcuuguuggaggcgugguccugcucggggcuaugcuggugggacaaguuaccugaggacuaguaauaaggaaacuguaugaaugucugugggcaggaagugaagagauccuucuguaaagguuuuuggaauuaugucugcugaauaauaaacuuuuuugaaauaauaaaucugguagaaaaaugagaucuaaaaaaaaaaaaaaaaaaaaaaaaaaaaaaaaaaaaaaaaaaaaaaaaaaaaaaaaaaaaaaaaugcaucccccccccccccccccccccccccccccccaaaggcucuuuucagagccaccagaauu

SEQ ID NO: 2430 - RNA, 1559 nt, Artificial Sequence
  mRNA product Design h-4 comprising derived and/or modified sequence from YFV__NC_002031.1__eSS-NS1 (polyprotein: aa758-1130) (opt5)
gggagagggcgcuuggcuugcaaggacccugagcugcggcauugaagcacacccaacccaacucgacugaagucagccucacugaaccggaucugagaaucuucucucucugggcuugccagggcucuccgaaccuagcuagcauccucuucaauuccaacuagaaagcuuaccaugagcauguccaugauccuggugggcgucauuaugauguuccucucucuggggguuggagccgaccagggcugcgcuaucaacuuugggaagagagagcuuaaauguggagauggcauuuucaucuuucgggacagcgaugacuggcugaauaaguacuccuauuaccccgaagauccugugaaacucgccucuauugugaaggcgagcuucgaggaagggaaaugcggacugaacuccgucgacucucuugagcacgaaauguggcgcagcagagcugaugagaucaaugccaucuuugaggaaaacgagguggacauuuccguugugguccaagauccgaagaauguguaucagcggggcacccaucccuucagccgcaucagagacggccugcaguacggguggaagacauggggcaaaaaccucguguuuucuccuggacggaagaauggguccuucauuaucgauggaaaaagccgcaaggaaugucccuuuucuaacagaguguggaacuccuuccagauugaggaguuuggcacgggggucuucaccacacggguguauauggacgccguguuugaauacaccaucgauugcgacggaagcauucugggcgcugccgucaauggcaaaaagucugcucacggguccccuacauucuggaugggaagccaugagguuaauggcaccuggaugauccacacacuggaagcccucgacuauaaggagugugaauggccccugacccauacgaucgggaccuccguggaggagucugaaauguucaugccucgcagcauuggaggcccgguguccagccacaaccacauccccggguacaaaguccaaacaaauggaccuuggaugcagguuccccuugagguuaagagagaagcgugcccuggcaccucugugauuaucgauggcaacugugacgggcggggaaaauccacacgcagcaccacggauucuggcaaggucauucccgaguggugcuguagaagcugcacaaugccgccuguguccuuucaugggucugacggauguugguaccccauggaaauccggccucgcaaaacccacgagagccaucugguuagauccugggugacagccugaggacuaguaauaaggaaacuguaugaaugucugugggcaggaagugaagagauccuucuguaaagguuuuuggaauuaugucugcugaauaauaaacuuuuuugaaauaauaaaucugguagaaaaaugagaucuaaaaaaaaaaaaaaaaaaaaaaaaaaaaaaaaaaaaaaaaaaaaaaaaaaaaaaaaaaaaaaaaugcaucccccccccccccccccccccccccccccccaaaggcucuuuucagagccaccagaauu

SEQ ID NO: 2431 - RNA, 1550 nt, Artificial Sequence
  mRNA product Design h-4 comprising derived and/or modified sequence from YFV__NC_002031.1__SSIgE-NS1 (polyprotein: aa779-1130) (opt5)
gggagagggcgcuuggcuugcaaggacccugagcugcggcauugaagcacacccaacccaacucgacugaagucagccucacugaaccggaucugagaaucuucucucucugggcuugccagggcucuccgaaccuagcuagcauccucuucaauuccaacuagaaagcuuaccauggacuggaccuggauccuguuccucguggccgcugccacaagaguccacagcgaccagggcugcgcuaucaacuuugggaagagagagcuuaaauguggagauggcauuuucaucuuucgggacagcgaugacuggcugaauaaguacuccuauuaccccgaagauccugugaaacucgccucuauugugaaggcgagcuucgaggaagggaaaugcggacugaacuccgucgacucucuugagcacgaaauguggcgcagcagagcugaugagaucaaugccaucuuugaggaaaacgagguggacauuuccguugugguccaagauccgaagaauguguaucagcggggcacccaucccuucagccgcaucagagacggccugcaguacggguggaagacauggggcaaaaaccucguguuuucuccuggacggaagaauggguccuucauuaucgauggaaaaagccgcaaggaaugucccuuuucuaacagaguguggaacuccuuccagauugaggaguuuggcacgggggucuucaccacacggguguauauggacgccguguuugaauacaccaucgauugcgacggaagcauucugggcgcugccgucaauggcaaaaagucugcucacggguccccuacauucuggaugggaagccaugagguuaauggcaccuggaugauccacacacuggaagcccucgacuauaaggagugugaauggccccugacccauacgaucgggaccuccguggaggagucugaaauguucaugccucgcagcauuggaggcccgguguccagccacaaccacauccccggguacaaaguccaaacaaauggaccuuggaugcagguuccccuugagguuaagagagaagcgugcccuggcaccucugugauuaucgauggcaacugugacgggcggggaaaauccacacgcagcaccacggauucuggcaaggucauucccgaguggugcuguagaagcugcacaaugccgccuguguccuuucaugggucugacggauguugguaccccauggaaauccggccucgcaaaacccacgagagccaucugguuagauccugggugacagccugaggacuaguaauaaggaaacuguaugaaugucugugggcaggaagugaagagauccuucuguaaagguuuuuggaauuaugucugcugaauaauaaacuuuuuugaaauaauaaaucugguagaaaaaugagaucuaaaaaaaaaaaaaaaaaaaaaaaaaaaaaaaaaaaaaaaaaaaaaaaaaaaaaaaaaaaaaaaaugcaucccccccccccccccccccccccccccccccaaaggcucuuuucagagccaccagaauu

SEQ ID NO: 2432 - RNA, 1700 nt, Artificial Sequence
  mRNA product Design h-4 comprising derived and/or modified sequence from YFV__NC_002031.1__eSS-NS1-Y (polyprotein: aa758-1177) (opt6)
gggagagggcgcuuggcuugcaaggacccugagcugcggcauugaagcacacccaacccaacucgacugaagucagccucacugaaccggaucugagaaucuucucucucugggcuugccagggcucuccgaaccuagcuagcauccucuucaauuccaacuagaaagcuuaccaugucaaugaguaugauauuaguagggguaauaaugauguuccuuagcuuaggaguaggagcagaucaaggaugugcaauaaauuuuggaaaaagagaacuaaaaugcggagacgguauauuuauauuuagagauagugaugauuggcuaaauaaauauaguuacuauccagaagauccaguuaaauuagccucaauaguaaaagcuagcuuugaagaaggaaaauguggacuaaauucaguagacagucuagaacacgaaauguggagaucaagggcagaugaaauaaaugcaaucuuugaagaaaaugaaguggauauaucagugguaguacaagauccaaaaaauguguaccaaagaggaacacauccauuuaguaggauaagagauggauuacaauauggauggaaaacauggggaaaaaauuuaguauuuaguccaggaagaaaaaauggaucauuuauaauagaugggaaaagccgaaaagaauguccauuuucaaacagaguauggaacucauuucaaauugaagaauuuggaacaggaguauuuacaacaagaguauauauggaugcaguauuugaauacaccauagauugugauggaaguauauuaggagcagcaguaaaugggaaaaaaagcgcucacggaaguccaacguuuuggaugggaucacacgagguaaauggcacguggaugauacauacuuuagaagcauuagauuacaaagaaugugaauggccauuaacucauacaauagguacaagcguagaagaaagugagauguuuaugccacguucaaucggggggccaguaucaagucauaaccauauaccaggauauaaaguacaaacgaauggaccuuggaugcaaguaccacuagaaguaaaacgagaagcaugcccaggaacgucaguaauaauagauggaaauugugauggcagggguaaaagcacaagaucaacaacagauucaggaaaaguaauaccugaaugguguuguagaaguuguacaaugccaccaguaucauuccauggaagugauggaugcugguauccaauggaaauuagaccaagaaaaacucaugaaagucauuuaguaagaucuuggguaacugcaggagaaauacaugcaguaccauuugguuuaguaaguaugaugauagcaauggaaguaguucuaagaaaaaggcaagggccuaaacaaaugcuagugggaggaguaguauugcuaggugcaauguuaguaggccaaguaaccugaggacuaguaauaaggaaacuguaugaaugucugugggcaggaagugaagagauccuucuguaaagguuuuuggaauuaugucugcugaauaauaaacuuuuuugaaauaauaaaucugguagaaaaaugagaucuaaaaaaaaaaaaaaaaaaaaaaaaaaaaaaaaaaaaaaaaaaaaaaaaaaaaaaaaaaaaaaaaugcaucccccccccccccccccccccccccccccccaaaggcucuuuucagagccaccagaauu

SEQ ID NO: 2433 - RNA, 1559 nt, Artificial Sequence
  mRNA product Design h-4 comprising derived and/or modified sequence from YFV__NC_002031.1__eSS-NS1 (polyprotein: aa758-1130) (opt6)
gggagagggcgcuuggcuugcaaggacccugagcugcggcauugaagcacacccaacccaacucgacugaagucagccucacugaaccggaucugagaaucuucucucucugggcuugccagggcucuccgaaccuagcuagcauccucuucaauuccaacuagaaagcuuaccaugucaaugaguaugauauuaguagggguaauaaugauguuccuuagcuuaggaguaggagcagaucaaggaugugcaauaaauuuuggaaaaagagaacuaaaaugcggagacgguauauuuauauuuagagauagugaugauuggcuaaauaaauauaguuacuauccagaagauccaguuaaauuagccucaauaguaaaagcuagcuuugaagaaggaaaauguggacuaaauucaguagacagucuagaacacgaaauguggagaucaagggcagaugaaauaaaugcaaucuuugaagaaaaugaaguggauauaucagugguaguacaagauccaaaaaauguguaccaaagaggaacacauccauuuaguaggauaagagauggauuacaauauggauggaaaacauggggaaaaaauuuaguauuuaguccaggaagaaaaaauggaucauuuauaauagaugggaaaagccgaaaagaauguccauuuucaaacagaguauggaacucauuucaaauugaagaauuuggaacaggaguauuuacaacaagaguauauauggaugcaguauuugaauacaccauagauugugauggaaguauauuaggagcagcaguaaaugggaaaaaaagcgcucacggaaguccaacguuuuggaugggaucacacgagguaaauggcacguggaugauacauacuuuagaagcauuagauuacaaagaaugugaauggccauuaacucauacaauagguacaagcguagaagaaagugagauguuuaugccacguucaaucggggggccaguaucaagucauaaccauauaccaggauauaaaguacaaacgaauggaccuuggaugcaaguaccacuagaaguaaaacgagaagcaugcccaggaacgucaguaauaauagauggaaauugugauggcagggguaaaagcacaagaucaacaacagauucaggaaaaguaauaccugaaugguguuguagaaguuguacaaugccaccaguaucauuccauggaagugauggaugcugguauccaauggaaauuagaccaagaaaaacucaugaaagucauuuaguaagaucuuggguaacugcaugaggacuaguaauaaggaaacuguaugaaugucugugggcaggaagugaagagauccuucuguaaagguuuuuggaauuaugucugcugaauaauaaacuuuuuugaaauaauaaaucugguagaaaaaugagaucuaaaaaaaaaaaaaaaaaaaaaaaaaaaaaaaaaaaaaaaaaaaaaaaaaaaaaaaaaaaaaaaaugcaucccccccccccccccccccccccccccccccaaaggcucuuuucagagccaccagaauu

SEQ ID NO: 2434 - RNA, 1550 nt, Artificial Sequence
  mRNA product Design h-4 comprising derived and/or modified sequence from YFV__NC_002031.1__SSIgE-NS1 (polyprotein: aa779-1130) (opt6)
gggagagggcgcuuggcuugcaaggacccugagcugcggcauugaagcacacccaacccaacucgacugaagucagccucacugaaccggaucugagaaucuucucucucugggcuugccagggcucuccgaaccuagcuagcauccucuucaauuccaacuagaaagcuuaccauggacuggacauggauauuauuuuuaguagcagcagcaacaagaguacauucagaucaaggaugugcaauaaauuuuggaaaaagagaacuaaaaugcggagacgguauauuuauauuuagagauagugaugauuggcuaaauaaauauaguuacuauccagaagauccaguuaaauuagccucaauaguaaaagcuagcuuugaagaaggaaaauguggacuaaauucaguagacagucuagaacacgaaauguggagaucaagggcagaugaaauaaaugcaaucuuugaagaaaaugaaguggauauaucagugguaguacaagauccaaaaaauguguaccaaagaggaacacauccauuuaguaggauaagagauggauuacaauauggauggaaaacauggggaaaaaauuuaguauuuaguccaggaagaaaaaauggaucauuuauaauagaugggaaaagccgaaaagaauguccauuuucaaacagaguauggaacucauuucaaauugaagaauuuggaacaggaguauuuacaacaagaguauauauggaugcaguauuugaauacaccauagauugugauggaaguauauuaggagcagcaguaaaugggaaaaaaagcgcucacggaaguccaacguuuuggaugggaucacacgagguaaauggcacguggaugauacauacuuuagaagcauuagauuacaaagaaugugaauggccauuaacucauacaauagguacaagcguagaagaaagugagauguuuaugccacguucaaucggggggccaguaucaagucauaaccauauaccaggauauaaaguacaaacgaauggaccuuggaugcaaguaccacuagaaguaaaacgagaagcaugcccaggaacgucaguaauaauagauggaaauugugauggcagggguaaaagcacaagaucaacaacagauucaggaaaaguaauaccugaaugguguuguagaaguuguacaaugccaccaguaucauuccauggaagugauggaugcugguauccaauggaaauuagaccaagaaaaacucaugaaagucauuuaguaagaucuuggguaacugcaugaggacuaguaauaaggaaacuguaugaaugucugugggcaggaagugaagagauccuucuguaaagguuuuuggaauuaugucugcugaauaauaaacuuuuuugaaauaauaaaucugguagaaaaaugagaucuaaaaaaaaaaaaaaaaaaaaaaaaaaaaaaaaaaaaaaaaaaaaaaaaaaaaaaaaaaaaaaaaugcaucccccccccccccccccccccccccccccccaaaggcucuuuucagagccaccagaauu

SEQ ID NO: 2435 - RNA, 1700 nt, Artificial Sequence
  mRNA product Design h-4 comprising derived and/or modified sequence from YFV__NC_002031.1__eSS-NS1-Y (polyprotein: aa758-1177) (opt11)
gggagagggcgcuuggcuugcaaggacccugagcugcggcauugaagcacacccaacccaacucgacugaagucagccucacugaaccggaucugagaaucuucucucucugggcuugccagggcucuccgaaccuagcuagcauccucuucaauuccaacuagaaagcuuaccaugagcaugagcaugaucuugguaggggucauaaugauguucuugagccuagggguaggcgcagaccagggaugcgcgauaaacuucggcaaacgcgaacucaaaugcggggacggaaucuucaucuuucgcgacagugacgacuggcuaaacaaguacaguuacuacccggaagaccccguaaaacuagccucaauaguaaaagcgagcuucgaagaaggaaagugcgggcuaaacagcguggacucccuagagcacgagauguggaggucgagagcggacgagaucaacgccauauucgaagaaaaugaaguagacauaagcguagucguacaagaucccaaaaacguguaccagcgcggaacccaccccuucagcaggaucagagacgggcuacaauacggauggaagacauggggcaaaaaccuggucuucagcccgggcaggaaaaacggaucguucaucaucgauggcaaaagccgaaaggagugcccguucucaaacaggguauggaacucguuccagaucgaagaguucggcacaggcgucuucacgacaagagucuacauggacgcaguguucgaauacacaaucgacugcgacggcuccauacugggcgcagccgugaacgggaaaaagagcgcacacggaagcccgaccuuuuggauggguucgcacgaggugaacggaacauggaugauacacaccuuagaagcacucgauuacaaagaaugcgaauggcccuuaacccacaccaucgguacguccguagaagaaagcgaaauguucaugccgcgcucaaucggcggcccagucucgagccacaaccacaucccgggcuauaaaguacaaacaaacgggccauggaugcagguaccccucgaggucaagcgcgaagccugccccggaaccucggucaucaucgacggcaacugcgacggcaggggaaaaagcacgcgcucaaccacggacucgggaaagguaauaccagaguggugcugcaggagcugcaccaugccaccgguaucguuccacggcucagacggaugcugguacccgauggaaaucagacccagaaaaacgcacgagagccaccucguacgcucauggguaaccgcaggcgagauccacgccgugccauuuggacuggucucaaugaugauagcgauggaggucgugcucaggaagaggcaagggcccaagcaaaugcucguaggaggaguaguacuccugggcgcaaugcuggucggacaggugaccugaggacuaguaauaaggaaacuguaugaaugucugugggcaggaagugaagagauccuucuguaaagguuuuuggaauuaugucugcugaauaauaaacuuuuuugaaauaauaaaucugguagaaaaaugagaucuaaaaaaaaaaaaaaaaaaaaaaaaaaaaaaaaaaaaaaaaaaaaaaaaaaaaaaaaaaaaaaaaugcaucccccccccccccccccccccccccccccccaaaggcucuuuucagagccaccagaauu

SEQ ID NO: 2436 - RNA, 1559 nt, Artificial Sequence
  mRNA product Design h-4 comprising derived and/or modified sequence from YFV__NC_002031.1__eSS-NS1 (polyprotein: aa758-1130) (opt11)
gggagagggcgcuuggcuugcaaggacccugagcugcggcauugaagcacacccaacccaacucgacugaagucagccucacugaaccggaucugagaaucuucucucucugggcuugccagggcucuccgaaccuagcuagcauccucuucaauuccaacuagaaagcuuaccaugagcaugagcaugaucuugguaggggucauaaugauguucuugagccuagggguaggcgcagaccagggaugcgcgauaaacuucggcaaacgcgaacucaaaugcggggacggaaucuucaucuuucgcgacagugacgacuggcuaaacaaguacaguuacuacccggaagaccccguaaaacuagccucaauaguaaaagcgagcuucgaagaaggaaagugcgggcuaaacagcguggacucccuagagcacgagauguggaggucgagagcggacgagaucaacgccauauucgaagaaaaugaaguagacauaagcguagucguacaagaucccaaaaacguguaccagcgcggaacccaccccuucagcaggaucagagacgggcuacaauacggauggaagacauggggcaaaaaccuggucuucagcccgggcaggaaaaacggaucguucaucaucgauggcaaaagccgaaaggagugcccguucucaaacaggguauggaacucguuccagaucgaagaguucggcacaggcgucuucacgacaagagucuacauggacgcaguguucgaauacacaaucgacugcgacggcuccauacugggcgcagccgugaacgggaaaaagagcgcacacggaagcccgaccuuuuggauggguucgcacgaggugaacggaacauggaugauacacaccuuagaagcacucgauuacaaagaaugcgaauggcccuuaacccacaccaucgguacguccguagaagaaagcgaaauguucaugccgcgcucaaucggcggcccagucucgagccacaaccacaucccgggcuauaaaguacaaacaaacgggccauggaugcagguaccccucgaggucaagcgcgaagccugccccggaaccucggucaucaucgacggcaacugcgacggcaggggaaaaagcacgcgcucaaccacggacucgggaaagguaauaccagaguggugcugcaggagcugcaccaugccaccgguaucguuccacggcucagacggaugcugguacccgauggaaaucagacccagaaaaacgcacgagagccaccucguacgcucauggguaaccgcaugaggacuaguaauaaggaaacuguaugaaugucugugggcaggaagugaagagauccuucuguaaagguuuuuggaauuaugucugcugaauaauaaacuuuuuugaaauaauaaaucugguagaaaaaugagaucuaaaaaaaaaaaaaaaaaaaaaaaaaaaaaaaaaaaaaaaaaaaaaaaaaaaaaaaaaaaaaaaaugcaucccccccccccccccccccccccccccccccaaaggcucuuuucagagccaccagaauu

SEQ ID NO: 2437 - RNA, 1550 nt, Artificial Sequence
  mRNA product Design h-4 comprising derived and/or modified sequence from YFV__NC_002031.1__SSIgE-NS1 (polyprotein: aa779-1130) (opt11)
gggagagggcgcuuggcuugcaaggacccugagcugcggcauugaagcacacccaacccaacucgacugaagucagccucacugaaccggaucugagaaucuucucucucugggcuugccagggcucuccgaaccuagcuagcauccucuucaauuccaacuagaaagcuuaccauggauuggacguggauacucuuucucguggccgcggccacgcgcgugcacucggaccagggaugcgcgauaaacuucggcaaacgcgaacucaaaugcggggacggaaucuucaucuuucgcgacagugacgacuggcuaaacaaguacaguuacuacccggaagaccccguaaaacuagccucaauaguaaaagcgagcuucgaagaaggaaagugcgggcuaaacagcguggacucccuagagcacgagauguggaggucgagagcggacgagaucaacgccauauucgaagaaaaugaaguagacauaagcguagucguacaagaucccaaaaacguguaccagcgcggaacccaccccuucagcaggaucagagacgggcuacaauacggauggaagacauggggcaaaaaccuggucuucagcccgggcaggaaaaacggaucguucaucaucgauggcaaaagccgaaaggagugcccguucucaaacaggguauggaacucguuccagaucgaagaguucggcacaggcgucuucacgacaagagucuacauggacgcaguguucgaauacacaaucgacugcgacggcuccauacugggcgcagccgugaacgggaaaaagagcgcacacggaagcccgaccuuuuggauggguucgcacgaggugaacggaacauggaugauacacaccuuagaagcacucgauuacaaagaaugcgaauggcccuuaacccacaccaucgguacguccguagaagaaagcgaaauguucaugccgcgcucaaucggcggcccagucucgagccacaaccacaucccgggcuauaaaguacaaacaaacgggccauggaugcagguaccccucgaggucaagcgcgaagccugccccggaaccucggucaucaucgacggcaacugcgacggcaggggaaaaagcacgcgcucaaccacggacucgggaaagguaauaccagaguggugcugcaggagcugcaccaugccaccgguaucguuccacggcucagacggaugcugguacccgauggaaaucagacccagaaaaacgcacgagagccaccucguacgcucauggguaaccgcaugaggacuaguaauaaggaaacuguaugaaugucugugggcaggaagugaagagauccuucuguaaagguuuuuggaauuaugucugcugaauaauaaacuuuuuugaaauaauaaaucugguagaaaaaugagaucuaaaaaaaaaaaaaaaaaaaaaaaaaaaaaaaaaaaaaaaaaaaaaaaaaaaaaaaaaaaaaaaaugcaucccccccccccccccccccccccccccccccaaaggcucuuuucagagccaccagaauu

SEQ ID NO: 2438 - RNA, 1716 nt, Artificial Sequence
  mRNA product Design h-5 comprising derived and/or modified sequence from YFV__NC_002031.1__eSS-NS1-Y (polyprotein: aa758-1177) (wt)
gggagagggcgcuuggcuugcaaggacccugagcugcggcauugaagcacacccaacccaacucgacugaagucagccucacugaaccggaucugagaaucuucucucucugggcuugccagggcucuccgaaccuagcuagcauccucuucaauuccaacuagaaagcuuaccauguccaugagcaugaucuugguaggagugaucaugauguuuuugucucuaggaguuggggcggaucaaggaugcgccaucaacuuuggcaagagagagcucaagugcggagaugguaucuucauauuuagagacucugaugacuggcugaacaaguacucauacuauccagaagauccugugaagcuugcaucaauagugaaagccucuuuugaagaagggaaguguggccuaaauucaguugacucccuugagcaugagauguggagaagcagggcagaugagaucaaugccauuuuugaggaaaacgagguggacauuucuguugucgugcaggauccaaagaauguuuaccagagaggaacucauccauuuuccagaauucgggauggucugcaguaugguuggaagacuugggguaagaaccuuguguucuccccagggaggaagaauggaagcuucaucauagauggaaaguccaggaaagaaugcccguuuucaaaccgggucuggaauucuuuccagauagaggaguuugggacgggaguguucaccacacgcguguacauggacgcagucuuugaauacaccauagacugcgauggaucuaucuugggugcagcggugaacggaaaaaagagugcccauggcucuccaacauuuuggaugggaagucaugaaguaaaugggacauggaugauccacaccuuggaggcauuagauuacaaggagugugaguggccacugacacauacgauuggaacaucaguugaagagagugaaauguucaugccgagaucaaucggaggcccaguuagcucucacaaucauaucccuggauacaagguucagacgaacggaccuuggaugcagguaccacuagaagugaagagagaagcuugcccagggacuagcgugaucauugauggcaacugugauggacggggaaaaucaaccagauccaccacggauagcgggaaaguuauuccugaaugguguugccgcuccugcacaaugccgccugugagcuuccaugguagugauggguguugguaucccauggaaauuaggccaaggaaaacgcaugaaagccaucuggugcgcuccuggguuacagcuggagaaauacaugcugucccuuuugguuuggugagcaugaugauagcaauggaagugguccuaaggaaaagacagggaccaaagcaaauguugguuggaggaguagugcucuugggagcaaugcuggucgggcaaguaacuugaggacuaguacuggcugcaucucccuuuccucuguccuccauccuucucccaggauggugaagggggaccugguacccagugauccccaccccaggauccuaaaucaugacuuaccugcuaauaaaaacucauuggaaaagugagaagaucuaaaaaaaaaaaaaaaaaaaaaaaaaaaaaaaaaaaaaaaaaaaaaaaaaaaaaaaaaaaaaaaaugcaucccccccccccccccccccccccccccccccaaaggcucuuuucagagccaccagaauu

SEQ ID NO: 2439 - RNA, 1575 nt, Artificial Sequence
  mRNA product Design h-5 comprising derived and/or modified sequence from YFV__NC_002031.1__eSS-NS1 (polyprotein: aa758-1130) (wt)
gggagagggcgcuuggcuugcaaggacccugagcugcggcauugaagcacacccaacccaacucgacugaagucagccucacugaaccggaucugagaaucuucucucucugggcuugccagggcucuccgaaccuagcuagcauccucuucaauuccaacuagaaagcuuaccauguccaugagcaugaucuugguaggagugaucaugauguuuuugucucuaggaguuggggcggaucaaggaugcgccaucaacuuuggcaagagagagcucaagugcggagaugguaucuucauauuuagagacucugaugacuggcugaacaaguacucauacuauccagaagauccugugaagcuugcaucaauagugaaagccucuuuugaagaagggaaguguggccuaaauucaguugacucccuugagcaugagauguggagaagcagggcagaugagaucaaugccauuuuugaggaaaacgagguggacauuucuguugucgugcaggauccaaagaauguuuaccagagaggaacucauccauuuuccagaauucgggauggucugcaguaugguuggaagacuugggguaagaaccuuguguucuccccagggaggaagaauggaagcuucaucauagauggaaaguccaggaaagaaugcccguuuucaaaccgggucuggaauucuuuccagauagaggaguuugggacgggaguguucaccacacgcguguacauggacgcagucuuugaauacaccauagacugcgauggaucuaucuugggugcagcggugaacggaaaaaagagugcccauggcucuccaacauuuuggaugggaagucaugaaguaaaugggacauggaugauccacaccuuggaggcauuagauuacaaggagugugaguggccacugacacauacgauuggaacaucaguugaagagagugaaauguucaugccgagaucaaucggaggcccaguuagcucucacaaucauaucccuggauacaagguucagacgaacggaccuuggaugcagguaccacuagaagugaagagagaagcuugcccagggacuagcgugaucauugauggcaacugugauggacggggaaaaucaaccagauccaccacggauagcgggaaaguuauuccugaaugguguugccgcuccugcacaaugccgccugugagcuuccaugguagugauggguguugguaucccauggaaauuaggccaaggaaaacgcaugaaagccaucuggugcgcuccuggguuacagcuugaggacuaguacuggcugcaucucccuuuccucuguccuccauccuucucccaggauggugaagggggaccugguacccagugauccccaccccaggauccuaaaucaugacuuaccugcuaauaaaaacucauuggaaaagugagaagaucuaaaaaaaaaaaaaaaaaaaaaaaaaaaaaaaaaaaaaaaaaaaaaaaaaaaaaaaaaaaaaaaaugcaucccccccccccccccccccccccccccccccaaaggcucuuuucagagccaccagaauu

SEQ ID NO: 2440 - RNA, 1566 nt, Artificial Sequence
  mRNA product Design h-5 comprising derived and/or modified sequence from YFV__NC_002031.1__SSIgE-NS1 (polyprotein: aa779-1130) (wt)
gggagagggcgcuuggcuugcaaggacccugagcugcggcauugaagcacacccaacccaacucgacugaagucagccucacugaaccggaucugagaaucuucucucucugggcuugccagggcucuccgaaccuagcuagcauccucuucaauuccaacuagaaagcuuaccauggacuggaccuggauccuguuccucguggccgccgcgacccgcguccacagcgaucaaggaugcgccaucaacuuuggcaagagagagcucaagugcggagaugguaucuucauauuuagagacucugaugacuggcugaacaaguacucauacuauccagaagauccugugaagcuugcaucaauagugaaagccucuuuugaagaagggaaguguggccuaaauucaguugacucccuugagcaugagauguggagaagcagggcagaugagaucaaugccauuuuugaggaaaacgagguggacauuucuguugucgugcaggauccaaagaauguuuaccagagaggaacucauccauuuuccagaauucgggauggucugcaguaugguuggaagacuugggguaagaaccuuguguucuccccagggaggaagaauggaagcuucaucauagauggaaaguccaggaaagaaugcccguuuucaaaccgggucuggaauucuuuccagauagaggaguuugggacgggaguguucaccacacgcguguacauggacgcagucuuugaauacaccauagacugcgauggaucuaucuugggugcagcggugaacggaaaaaagagugcccauggcucuccaacauuuuggaugggaagucaugaaguaaaugggacauggaugauccacaccuuggaggcauuagauuacaaggagugugaguggccacugacacauacgauuggaacaucaguugaagagagugaaauguucaugccgagaucaaucggaggcccaguuagcucucacaaucauaucccuggauacaagguucagacgaacggaccuuggaugcagguaccacuagaagugaagagagaagcuugcccagggacuagcgugaucauugauggcaacugugauggacggggaaaaucaaccagauccaccacggauagcgggaaaguuauuccugaaugguguugccgcuccugcacaaugccgccugugagcuuccaugguagugauggguguugguaucccauggaaauuaggccaaggaaaacgcaugaaagccaucuggugcgcuccuggguuacagcuugaggacuaguacuggcugcaucucccuuuccucuguccuccauccuucucccaggauggugaagggggaccugguacccagugauccccaccccaggauccuaaaucaugacuuaccugcuaauaaaaacucauuggaaaagugagaagaucuaaaaaaaaaaaaaaaaaaaaaaaaaaaaaaaaaaaaaaaaaaaaaaaaaaaaaaaaaaaaaaaaugcaucccccccccccccccccccccccccccccccaaaggcucuuuucagagccaccagaauu

SEQ ID NO: 2441 - RNA, 1716 nt, Artificial Sequence
  mRNA product Design h-5 comprising derived and/or modified sequence from YFV__NC_002031.1__eSS-NS1-Y (polyprotein: aa758-1177) (opt1)
gggagagggcgcuuggcuugcaaggacccugagcugcggcauugaagcacacccaacccaacucgacugaagucagccucacugaaccggaucugagaaucuucucucucugggcuugccagggcucuccgaaccuagcuagcauccucuucaauuccaacuagaaagcuuaccaugagcauguccaugauccuggugggcgucaucaugauguuccucagccugggggugggcgccgaccaggggugcgccaucaacuucggcaagcgcgagcugaagugcggggacggcaucuucaucuuccgggacuccgacgacuggcucaacaaguacagcuacuaccccgaggacccggugaagcuggcguccaucgucaaggccagcuucgaggagggcaagugcgggcugaacuccguggacagccucgagcacgagauguggcgcucccgggccgacgagaucaacgccaucuucgaggagaacgagguggacaucagcgucguggugcaggaccccaagaacgucuaccagcgcggcacccaccccuucucccggauccgcgacgggcugcaguacggcuggaagaccugggggaagaaccugguguucagccccggccggaagaacggcuccuucaucaucgacggcaagagccgcaaggagugcccguucuccaaccggguguggaacagcuuccagaucgaggaguucgggacgggggucuucaccacccgcguguacauggacgccguguucgaguacaccaucgacugcgacggcuccauccucggcgcggccgucaacgggaagaaguccgcccacggcagccccacguucuggauggggagccacgaggugaacggcaccuggaugauccacacccuggaggcccuggacuacaaggagugcgaguggccccucacccacacgaucgggaccagcguggaggaguccgagauguucaugccccggagcaucggcggcccggucuccagccacaaccacauccccggguacaaggugcagaccaacggccccuggaugcaggucccccuggaggugaagcgcgaggcgugcccggggaccuccgugaucaucgacggcaacugcgacgggcggggcaagagcacgcgcuccaccaccgacagcggcaaggugauccccgaguggugcugccgguccugcaccaugccgcccgucagcuuccacggguccgacggcugcugguaccccauggagauccgcccccggaagacgcacgagagccaccuggugcgcuccugggucaccgccggggagauccacgccgugcccuucggccucgugagcaugaugaucgccauggaggucgugcugcggaagcgccaggggcccaagcagaugcuggugggcggcgucgugcuccugggggccaugcuggugggccaggucaccugaggacuaguacuggcugcaucucccuuuccucuguccuccauccuucucccaggauggugaagggggaccugguacccagugauccccaccccaggauccuaaaucaugacuuaccugcuaauaaaaacucauuggaaaagugagaagaucuaaaaaaaaaaaaaaaaaaaaaaaaaaaaaaaaaaaaaaaaaaaaaaaaaaaaaaaaaaaaaaaaugcaucccccccccccccccccccccccccccccccaaaggcucuuuucagagccaccagaauu

SEQ ID NO: 2442 - RNA, 1575 nt, Artificial Sequence
  mRNA product Design h-5 comprising derived and/or modified sequence from YFV__NC_002031.1__eSS-NS1 (polyprotein: aa758-1130) (opt1)
gggagagggcgcuuggcuugcaaggacccugagcugcggcauugaagcacacccaacccaacucgacugaagucagccucacugaaccggaucugagaaucuucucucucugggcuugccagggcucuccgaaccuagcuagcauccucuucaauuccaacuagaaagcuuaccaugagcauguccaugauccuggugggcgucaucaugauguuccucagccugggggugggcgccgaccaggggugcgccaucaacuucggcaagcgcgagcugaagugcggggacggcaucuucaucuuccgggacuccgacgacuggcucaacaaguacagcuacuaccccgaggacccggugaagcuggcguccaucgucaaggccagcuucgaggagggcaagugcgggcugaacuccguggacagccucgagcacgagauguggcgcucccgggccgacgagaucaacgccaucuucgaggagaacgagguggacaucagcgucguggugcaggaccccaagaacgucuaccagcgcggcacccaccccuucucccggauccgcgacgggcugcaguacggcuggaagaccugggggaagaaccugguguucagccccggccggaagaacggcuccuucaucaucgacggcaagagccgcaaggagugcccguucuccaaccggguguggaacagcuuccagaucgaggaguucgggacgggggucuucaccacccgcguguacauggacgccguguucgaguacaccaucgacugcgacggcuccauccucggcgcggccgucaacgggaagaaguccgcccacggcagccccacguucuggauggggagccacgaggugaacggcaccuggaugauccacacccuggaggcccuggacuacaaggagugcgaguggccccucacccacacgaucgggaccagcguggaggaguccgagauguucaugccccggagcaucggcggcccggucuccagccacaaccacauccccggguacaaggugcagaccaacggccccuggaugcaggucccccuggaggugaagcgcgaggcgugcccggggaccuccgugaucaucgacggcaacugcgacgggcggggcaagagcacgcgcuccaccaccgacagcggcaaggugauccccgaguggugcugccgguccugcaccaugccgcccgucagcuuccacggguccgacggcugcugguaccccauggagauccgcccccggaagacgcacgagagccaccuggugcgcuccugggucaccgccugaggacuaguacuggcugcaucucccuuuccucuguccuccauccuucucccaggauggugaagggggaccugguacccagugauccccaccccaggauccuaaaucaugacuuaccugcuaauaaaaacucauuggaaaagugagaagaucuaaaaaaaaaaaaaaaaaaaaaaaaaaaaaaaaaaaaaaaaaaaaaaaaaaaaaaaaaaaaaaaaugcaucccccccccccccccccccccccccccccccaaaggcucuuuucagagccaccagaauu

SEQ ID NO: 2443 - RNA, 1566 nt, Artificial Sequence
  mRNA product Design h-5 comprising derived and/or modified sequence from YFV__NC_002031.1__SSIgE-NS1 (polyprotein: aa779-1130) (opt1)
gggagagggcgcuuggcuugcaaggacccugagcugcggcauugaagcacacccaacccaacucgacugaagucagccucacugaaccggaucugagaaucuucucucucugggcuugccagggcucuccgaaccuagcuagcauccucuucaauuccaacuagaaagcuuaccauggacuggaccuggauccuguuccucguggccgccgcgacccgcguccacagcgaccaggggugcgccaucaacuucggcaagcgcgagcugaagugcggggacggcaucuucaucuuccgggacuccgacgacuggcucaacaaguacagcuacuaccccgaggacccggugaagcuggcguccaucgucaaggccagcuucgaggagggcaagugcgggcugaacuccguggacagccucgagcacgagauguggcgcucccgggccgacgagaucaacgccaucuucgaggagaacgagguggacaucagcgucguggugcaggaccccaagaacgucuaccagcgcggcacccaccccuucucccggauccgcgacgggcugcaguacggcuggaagaccugggggaagaaccugguguucagccccggccggaagaacggcuccuucaucaucgacggcaagagccgcaaggagugcccguucuccaaccggguguggaacagcuuccagaucgaggaguucgggacgggggucuucaccacccgcguguacauggacgccguguucgaguacaccaucgacugcgacggcuccauccucggcgcggccgucaacgggaagaaguccgcccacggcagccccacguucuggauggggagccacgaggugaacggcaccuggaugauccacacccuggaggcccuggacuacaaggagugcgaguggccccucacccacacgaucgggaccagcguggaggaguccgagauguucaugccccggagcaucggcggcccggucuccagccacaaccacauccccggguacaaggugcagaccaacggccccuggaugcaggucccccuggaggugaagcgcgaggcgugcccggggaccuccgugaucaucgacggcaacugcgacgggcggggcaagagcacgcgcuccaccaccgacagcggcaaggugauccccgaguggugcugccgguccugcaccaugccgcccgucagcuuccacggguccgacggcugcugguaccccauggagauccgcccccggaagacgcacgagagccaccuggugcgcuccugggucaccgccugaggacuaguacuggcugcaucucccuuuccucuguccuccauccuucucccaggauggugaagggggaccugguacccagugauccccaccccaggauccuaaaucaugacuuaccugcuaauaaaaacucauuggaaaagugagaagaucuaaaaaaaaaaaaaaaaaaaaaaaaaaaaaaaaaaaaaaaaaaaaaaaaaaaaaaaaaaaaaaaaugcaucccccccccccccccccccccccccccccccaaaggcucuuuucagagccaccagaauu

SEQ ID NO: 2444 - RNA, 1716 nt, Artificial Sequence
  mRNA product Design h-5 comprising derived and/or modified sequence from YFV__NC_002031.1__eSS-NS1-Y (polyprotein: aa758-1177) (opt2)
gggagagggcgcuuggcuugcaaggacccugagcugcggcauugaagcacacccaacccaacucgacugaagucagccucacugaaccggaucugagaaucuucucucucugggcuugccagggcucuccgaaccuagcuagcauccucuucaauuccaacuagaaagcuuaccauguccauguccaugauccucgucggcgucaucaugauguuccucucccucggcgucggcgccgaccagggcugcgccaucaacuucggcaagcgcgagcucaagugcggcgacggcaucuucaucuuccgcgacuccgacgacuggcucaacaaguacuccuacuaccccgaggaccccgucaagcucgccuccaucgucaaggccuccuucgaggagggcaagugcggccucaacuccgucgacucccucgagcacgagauguggcgcucccgcgccgacgagaucaacgccaucuucgaggagaacgaggucgacaucuccgucgucguccaggaccccaagaacgucuaccagcgcggcacccaccccuucucccgcauccgcgacggccuccaguacggcuggaagaccuggggcaagaaccucgucuucucccccggccgcaagaacggcuccuucaucaucgacggcaagucccgcaaggagugccccuucuccaaccgcgucuggaacuccuuccagaucgaggaguucggcaccggcgucuucaccacccgcgucuacauggacgccgucuucgaguacaccaucgacugcgacggcuccauccucggcgccgccgucaacggcaagaaguccgcccacggcucccccaccuucuggaugggcucccacgaggucaacggcaccuggaugauccacacccucgaggcccucgacuacaaggagugcgaguggccccucacccacaccaucggcaccuccgucgaggaguccgagauguucaugccccgcuccaucggcggccccgucuccucccacaaccacauccccggcuacaagguccagaccaacggccccuggaugcaggucccccucgaggucaagcgcgaggccugccccggcaccuccgucaucaucgacggcaacugcgacggccgcggcaaguccacccgcuccaccaccgacuccggcaaggucauccccgaguggugcugccgcuccugcaccaugccccccgucuccuuccacggcuccgacggcugcugguaccccauggagauccgcccccgcaagacccacgagucccaccucguccgcuccugggucaccgccggcgagauccacgccguccccuucggccucgucuccaugaugaucgccauggaggucguccuccgcaagcgccagggccccaagcagaugcucgucggcggcgucguccuccucggcgccaugcucgucggccaggucaccugaggacuaguacuggcugcaucucccuuuccucuguccuccauccuucucccaggauggugaagggggaccugguacccagugauccccaccccaggauccuaaaucaugacuuaccugcuaauaaaaacucauuggaaaagugagaagaucuaaaaaaaaaaaaaaaaaaaaaaaaaaaaaaaaaaaaaaaaaaaaaaaaaaaaaaaaaaaaaaaaugcaucccccccccccccccccccccccccccccccaaaggcucuuuucagagccaccagaauu

SEQ ID NO: 2445 - RNA, 1575 nt, Artificial Sequence
  mRNA product Design h-5 comprising derived and/or modified sequence from YFV__NC_002031.1__eSS-NS1 (polyprotein: aa758-1130) (opt2)
gggagagggcgcuuggcuugcaaggacccugagcugcggcauugaagcacacccaacccaacucgacugaagucagccucacugaaccggaucugagaaucuucucucucugggcuugccagggcucuccgaaccuagcuagcauccucuucaauuccaacuagaaagcuuaccauguccauguccaugauccucgucggcgucaucaugauguuccucucccucggcgucggcgccgaccagggcugcgccaucaacuucggcaagcgcgagcucaagugcggcgacggcaucuucaucuuccgcgacuccgacgacuggcucaacaaguacuccuacuaccccgaggaccccgucaagcucgccuccaucgucaaggccuccuucgaggagggcaagugcggccucaacuccgucgacucccucgagcacgagauguggcgcucccgcgccgacgagaucaacgccaucuucgaggagaacgaggucgacaucuccgucgucguccaggaccccaagaacgucuaccagcgcggcacccaccccuucucccgcauccgcgacggccuccaguacggcuggaagaccuggggcaagaaccucgucuucucccccggccgcaagaacggcuccuucaucaucgacggcaagucccgcaaggagugccccuucuccaaccgcgucuggaacuccuuccagaucgaggaguucggcaccggcgucuucaccacccgcgucuacauggacgccgucuucgaguacaccaucgacugcgacggcuccauccucggcgccgccgucaacggcaagaaguccgcccacggcucccccaccuucuggaugggcucccacgaggucaacggcaccuggaugauccacacccucgaggcccucgacuacaaggagugcgaguggccccucacccacaccaucggcaccuccgucgaggaguccgagauguucaugccccgcuccaucggcggccccgucuccucccacaaccacauccccggcuacaagguccagaccaacggccccuggaugcaggucccccucgaggucaagcgcgaggccugccccggcaccuccgucaucaucgacggcaacugcgacggccgcggcaaguccacccgcuccaccaccgacuccggcaaggucauccccgaguggugcugccgcuccugcaccaugccccccgucuccuuccacggcuccgacggcugcugguaccccauggagauccgcccccgcaagacccacgagucccaccucguccgcuccugggucaccgccugaggacuaguacuggcugcaucucccuuuccucuguccuccauccuucucccaggauggugaagggggaccugguacccagugauccccaccccaggauccuaaaucaugacuuaccugcuaauaaaaacucauuggaaaagugagaagaucuaaaaaaaaaaaaaaaaaaaaaaaaaaaaaaaaaaaaaaaaaaaaaaaaaaaaaaaaaaaaaaaaugcaucccccccccccccccccccccccccccccccaaaggcucuuuucagagccaccagaauu

SEQ ID NO: 2446 - RNA, 1566 nt, Artificial Sequence
  mRNA product Design h-5 comprising derived and/or modified sequence from YFV__NC_002031.1__SSIgE-NS1 (polyprotein: aa779-1130) (opt2)
gggagagggcgcuuggcuugcaaggacccugagcugcggcauugaagcacacccaacccaacucgacugaagucagccucacugaaccggaucugagaaucuucucucucugggcuugccagggcucuccgaaccuagcuagcauccucuucaauuccaacuagaaagcuuaccauggacuggaccuggauccucuuccucgucgccgccgccacccgcguccacuccgaccagggcugcgccaucaacuucggcaagcgcgagcucaagugcggcgacggcaucuucaucuuccgcgacuccgacgacuggcucaacaaguacuccuacuaccccgaggaccccgucaagcucgccuccaucgucaaggccuccuucgaggagggcaagugcggccucaacuccgucgacucccucgagcacgagauguggcgcucccgcgccgacgagaucaacgccaucuucgaggagaacgaggucgacaucuccgucgucguccaggaccccaagaacgucuaccagcgcggcacccaccccuucucccgcauccgcgacggccuccaguacggcuggaagaccuggggcaagaaccucgucuucucccccggccgcaagaacggcuccuucaucaucgacggcaagucccgcaaggagugccccuucuccaaccgcgucuggaacuccuuccagaucgaggaguucggcaccggcgucuucaccacccgcgucuacauggacgccgucuucgaguacaccaucgacugcgacggcuccauccucggcgccgccgucaacggcaagaaguccgcccacggcucccccaccuucuggaugggcucccacgaggucaacggcaccuggaugauccacacccucgaggcccucgacuacaaggagugcgaguggccccucacccacaccaucggcaccuccgucgaggaguccgagauguucaugccccgcuccaucggcggccccgucuccucccacaaccacauccccggcuacaagguccagaccaacggccccuggaugcaggucccccucgaggucaagcgcgaggccugccccggcaccuccgucaucaucgacggcaacugcgacggccgcggcaaguccacccgcuccaccaccgacuccggcaaggucauccccgaguggugcugccgcuccugcaccaugccccccgucuccuuccacggcuccgacggcugcugguaccccauggagauccgcccccgcaagacccacgagucccaccucguccgcuccugggucaccgccugaggacuaguacuggcugcaucucccuuuccucuguccuccauccuucucccaggauggugaagggggaccugguacccagugauccccaccccaggauccuaaaucaugacuuaccugcuaauaaaaacucauuggaaaagugagaagaucuaaaaaaaaaaaaaaaaaaaaaaaaaaaaaaaaaaaaaaaaaaaaaaaaaaaaaaaaaaaaaaaaugcaucccccccccccccccccccccccccccccccaaaggcucuuuucagagccaccagaauu

SEQ ID NO: 2447 - RNA, 1716 nt, Artificial Sequence
  mRNA product Design h-5 comprising derived and/or modified sequence from YFV__NC_002031.1__eSS-NS1-Y (polyprotein: aa758-1177) (opt3)
gggagagggcgcuuggcuugcaaggacccugagcugcggcauugaagcacacccaacccaacucgacugaagucagccucacugaaccggaucugagaaucuucucucucugggcuugccagggcucuccgaaccuagcuagcauccucuucaauuccaacuagaaagcuuaccaugagcauguccaugauccuggugggcgucauuaugauguuccucucucuugggguuggagccgaccaggguugcgcuauaaacuuuggcaagagagagcugaaauguggggauggaaucuucauuuuuagggacucagaugacugguugaauaaguacaguuauuaccccgaagauccugugaaauuagcaagcaucguaaaggccuccuucgaggaaggcaaaugcggucugaacucuguggacucgcuagagcacgaaauguggcggucacgcgcggaugagauuaaugcuaucuuugaggaaaacgaggucgacauaagcgugguugugcaagauccaaagaaugucuaucagcgagggacccauccguucagucguaucagagacggacuccaguacggcuggaagacauggggcaaaaaccugguguuuucccccgggaggaagaauggaucuuucauuaucgaugguaaaagccggaaggaauguccuuuuuccaaccgcguauggaacucauuccagauugaggaguuuggcacugggguuuucacgaccagaguguauauggacgccgucuuugaauacacaaucgauugcgacggaaguauacuuggcgcagccgugaaugguaaaaagagcgcucacgggucuccaacuuucuggaugggaucccaugaggugaauggcaccuggaugauucacacacuggaagcauuggacuauaaggagugugaauggccccucacccauacuaucggcacaucagucgaggagagcgaaauguucaugccuaggaguauugggggaccaguuucuucccacaaccacauccccgguuacaaagugcaaaccaauggcccuuggaugcagguaccacuggaggugaagcgggaagccugcccggggacgagcgucaucauugauggaaacugugacggccgcgguaaaucgacucgaucuaccacagauuccgggaaggugauacccgaguggugcuguagaucaugcacuaugccuccaguuaguuuucauggcagcgacggauguugguaccccauggaaaucaggccucggaaaacccacgagucccaucuggugcguucuugggucacagcuggcgagauucacgccgugccauucgggcucguaagcaugaugaucgcgauggaaguuguguuacgcaagagacagggacccaaacagaugcuggucgguggcgugguccuuuugggggcaaugcuggugggacaaguuaccugaggacuaguacuggcugcaucucccuuuccucuguccuccauccuucucccaggauggugaagggggaccugguacccagugauccccaccccaggauccuaaaucaugacuuaccugcuaauaaaaacucauuggaaaagugagaagaucuaaaaaaaaaaaaaaaaaaaaaaaaaaaaaaaaaaaaaaaaaaaaaaaaaaaaaaaaaaaaaaaaugcaucccccccccccccccccccccccccccccccaaaggcucuuuucagagccaccagaauu

SEQ ID NO: 2448 - RNA, 1575 nt, Artificial Sequence
  mRNA product Design h-5 comprising derived and/or modified sequence from YFV__NC_002031.1__eSS-NS1 (polyprotein: aa758-1130) (opt3)
gggagagggcgcuuggcuugcaaggacccugagcugcggcauugaagcacacccaacccaacucgacugaagucagccucacugaaccggaucugagaaucuucucucucugggcuugccagggcucuccgaaccuagcuagcauccucuucaauuccaacuagaaagcuuaccaugagcauguccaugauccuggugggcgucauuaugauguuccucucucuugggguuggagccgaccaggguugcgcuauaaacuuuggcaagagagagcugaaauguggggauggaaucuucauuuuuagggacucagaugacugguugaauaaguacaguuauuaccccgaagauccugugaaauuagcaagcaucguaaaggccuccuucgaggaaggcaaaugcggucugaacucuguggacucgcuagagcacgaaauguggcggucacgcgcggaugagauuaaugcuaucuuugaggaaaacgaggucgacauaagcgugguugugcaagauccaaagaaugucuaucagcgagggacccauccguucagucguaucagagacggacuccaguacggcuggaagacauggggcaaaaaccugguguuuucccccgggaggaagaauggaucuuucauuaucgaugguaaaagccggaaggaauguccuuuuuccaaccgcguauggaacucauuccagauugaggaguuuggcacugggguuuucacgaccagaguguauauggacgccgucuuugaauacacaaucgauugcgacggaaguauacuuggcgcagccgugaaugguaaaaagagcgcucacgggucuccaacuuucuggaugggaucccaugaggugaauggcaccuggaugauucacacacuggaagcauuggacuauaaggagugugaauggccccucacccauacuaucggcacaucagucgaggagagcgaaauguucaugccuaggaguauugggggaccaguuucuucccacaaccacauccccgguuacaaagugcaaaccaauggcccuuggaugcagguaccacuggaggugaagcgggaagccugcccggggacgagcgucaucauugauggaaacugugacggccgcgguaaaucgacucgaucuaccacagauuccgggaaggugauacccgaguggugcuguagaucaugcacuaugccuccaguuaguuuucauggcagcgacggauguugguaccccauggaaaucaggccucggaaaacccacgagucccaucuggugcguucuugggucacagcuugaggacuaguacuggcugcaucucccuuuccucuguccuccauccuucucccaggauggugaagggggaccugguacccagugauccccaccccaggauccuaaaucaugacuuaccugcuaauaaaaacucauuggaaaagugagaagaucuaaaaaaaaaaaaaaaaaaaaaaaaaaaaaaaaaaaaaaaaaaaaaaaaaaaaaaaaaaaaaaaaugcaucccccccccccccccccccccccccccccccaaaggcucuuuucagagccaccagaauu

SEQ ID NO: 2449 - RNA, 1566 nt, Artificial Sequence
  mRNA product Design h-5 comprising derived and/or modified sequence from YFV__NC_002031.1__SSIgE-NS1 (polyprotein: aa779-1130) (opt3)
gggagagggcgcuuggcuugcaaggacccugagcugcggcauugaagcacacccaacccaacucgacugaagucagccucacugaaccggaucugagaaucuucucucucugggcuugccagggcucuccgaaccuagcuagcauccucuucaauuccaacuagaaagcuuaccauggacuggaccuggauccuguuccucguggccgcugcaacaagaguccacagcgaccaggguugcgcuauaaacuuuggcaagagagagcugaaauguggggauggaaucuucauuuuuagggacucagaugacugguugaauaaguacaguuauuaccccgaagauccugugaaauuagcaagcaucguaaaggccuccuucgaggaaggcaaaugcggucugaacucuguggacucgcuagagcacgaaauguggcggucacgcgcggaugagauuaaugcuaucuuugaggaaaacgaggucgacauaagcgugguugugcaagauccaaagaaugucuaucagcgagggacccauccguucagucguaucagagacggacuccaguacggcuggaagacauggggcaaaaaccugguguuuucccccgggaggaagaauggaucuuucauuaucgaugguaaaagccggaaggaauguccuuuuuccaaccgcguauggaacucauuccagauugaggaguuuggcacugggguuuucacgaccagaguguauauggacgccgucuuugaauacacaaucgauugcgacggaaguauacuuggcgcagccgugaaugguaaaaagagcgcucacgggucuccaacuuucuggaugggaucccaugaggugaauggcaccuggaugauucacacacuggaagcauuggacuauaaggagugugaauggccccucacccauacuaucggcacaucagucgaggagagcgaaauguucaugccuaggaguauugggggaccaguuucuucccacaaccacauccccgguuacaaagugcaaaccaauggcccuuggaugcagguaccacuggaggugaagcgggaagccugcccggggacgagcgucaucauugauggaaacugugacggccgcgguaaaucgacucgaucuaccacagauuccgggaaggugauacccgaguggugcuguagaucaugcacuaugccuccaguuaguuuucauggcagcgacggauguugguaccccauggaaaucaggccucggaaaacccacgagucccaucuggugcguucuugggucacagcuugaggacuaguacuggcugcaucucccuuuccucuguccuccauccuucucccaggauggugaagggggaccugguacccagugauccccaccccaggauccuaaaucaugacuuaccugcuaauaaaaacucauuggaaaagugagaagaucuaaaaaaaaaaaaaaaaaaaaaaaaaaaaaaaaaaaaaaaaaaaaaaaaaaaaaaaaaaaaaaaaugcaucccccccccccccccccccccccccccccccaaaggcucuuuucagagccaccagaauu

SEQ ID NO: 2450 - RNA, 1716 nt, Artificial Sequence
  mRNA product Design h-5 comprising derived and/or modified sequence from YFV__NC_002031.1__eSS-NS1-Y (polyprotein: aa758-1177) (opt4)
gggagagggcgcuuggcuugcaaggacccugagcugcggcauugaagcacacccaacccaacucgacugaagucagccucacugaaccggaucugagaaucuucucucucugggcuugccagggcucuccgaaccuagcuagcauccucuucaauuccaacuagaaagcuuaccaugagcaugagcaugauccuggugggcgugaucaugauguuccugagccugggcgugggcgccgaccagggcugcgccaucaacuucggcaagagagagcugaagugcggcgacggcaucuucaucuucagagacagcgacgacuggcugaacaaguacagcuacuaccccgaggaccccgugaagcuggccagcaucgugaaggccagcuucgaggagggcaagugcggccugaacagcguggacagccuggagcacgagauguggagaagcagagccgacgagaucaacgccaucuucgaggagaacgagguggacaucagcgugguggugcaggaccccaagaacguguaccagagaggcacccaccccuucagcagaaucagagacggccugcaguacggcuggaagaccuggggcaagaaccugguguucagccccggcagaaagaacggcagcuucaucaucgacggcaagagcagaaaggagugccccuucagcaacagaguguggaacagcuuccagaucgaggaguucggcaccggcguguucaccaccagaguguacauggacgccguguucgaguacaccaucgacugcgacggcagcauccugggcgccgccgugaacggcaagaagagcgcccacggcagccccaccuucuggaugggcagccacgaggugaacggcaccuggaugauccacacccuggaggcccuggacuacaaggagugcgaguggccccugacccacaccaucggcaccagcguggaggagagcgagauguucaugcccagaagcaucggcggccccgugagcagccacaaccacauccccggcuacaaggugcagaccaacggccccuggaugcaggugccccuggaggugaagagagaggccugccccggcaccagcgugaucaucgacggcaacugcgacggcagaggcaagagcaccagaagcaccaccgacagcggcaaggugauccccgaguggugcugcagaagcugcaccaugccccccgugagcuuccacggcagcgacggcugcugguaccccauggagaucagacccagaaagacccacgagagccaccuggugagaagcugggugaccgccggcgagauccacgccgugcccuucggccuggugagcaugaugaucgccauggagguggugcugagaaagagacagggccccaagcagaugcuggugggcggcguggugcugcugggcgccaugcuggugggccaggugaccugaggacuaguacuggcugcaucucccuuuccucuguccuccauccuucucccaggauggugaagggggaccugguacccagugauccccaccccaggauccuaaaucaugacuuaccugcuaauaaaaacucauuggaaaagugagaagaucuaaaaaaaaaaaaaaaaaaaaaaaaaaaaaaaaaaaaaaaaaaaaaaaaaaaaaaaaaaaaaaaaugcaucccccccccccccccccccccccccccccccaaaggcucuuuucagagccaccagaauu

SEQ ID NO: 2451 - RNA, 1575 nt, Artificial Sequence
  mRNA product Design h-5 comprising derived and/or modified sequence from YFV__NC_002031.1__eSS-NS1 (polyprotein: aa758-1130) (opt4)
gggagagggcgcuuggcuugcaaggacccugagcugcggcauugaagcacacccaacccaacucgacugaagucagccucacugaaccggaucugagaaucuucucucucugggcuugccagggcucuccgaaccuagcuagcauccucuucaauuccaacuagaaagcuuaccaugagcaugagcaugauccuggugggcgugaucaugauguuccugagccugggcgugggcgccgaccagggcugcgccaucaacuucggcaagagagagcugaagugcggcgacggcaucuucaucuucagagacagcgacgacuggcugaacaaguacagcuacuaccccgaggaccccgugaagcuggccagcaucgugaaggccagcuucgaggagggcaagugcggccugaacagcguggacagccuggagcacgagauguggagaagcagagccgacgagaucaacgccaucuucgaggagaacgagguggacaucagcgugguggugcaggaccccaagaacguguaccagagaggcacccaccccuucagcagaaucagagacggccugcaguacggcuggaagaccuggggcaagaaccugguguucagccccggcagaaagaacggcagcuucaucaucgacggcaagagcagaaaggagugccccuucagcaacagaguguggaacagcuuccagaucgaggaguucggcaccggcguguucaccaccagaguguacauggacgccguguucgaguacaccaucgacugcgacggcagcauccugggcgccgccgugaacggcaagaagagcgcccacggcagccccaccuucuggaugggcagccacgaggugaacggcaccuggaugauccacacccuggaggcccuggacuacaaggagugcgaguggccccugacccacaccaucggcaccagcguggaggagagcgagauguucaugcccagaagcaucggcggccccgugagcagccacaaccacauccccggcuacaaggugcagaccaacggccccuggaugcaggugccccuggaggugaagagagaggccugccccggcaccagcgugaucaucgacggcaacugcgacggcagaggcaagagcaccagaagcaccaccgacagcggcaaggugauccccgaguggugcugcagaagcugcaccaugccccccgugagcuuccacggcagcgacggcugcugguaccccauggagaucagacccagaaagacccacgagagccaccuggugagaagcugggugaccgccugaggacuaguacuggcugcaucucccuuuccucuguccuccauccuucucccaggauggugaagggggaccugguacccagugauccccaccccaggauccuaaaucaugacuuaccugcuaauaaaaacucauuggaaaagugagaagaucuaaaaaaaaaaaaaaaaaaaaaaaaaaaaaaaaaaaaaaaaaaaaaaaaaaaaaaaaaaaaaaaaugcaucccccccccccccccccccccccccccccccaaaggcucuuuucagagccaccagaauu

SEQ ID NO: 2452 - RNA, 1566 nt, Artificial Sequence
  mRNA product Design h-5 comprising derived and/or modified sequence from YFV__NC_002031.1__SSIgE-NS1 (polyprotein: aa779-1130) (opt4)
gggagagggcgcuuggcuugcaaggacccugagcugcggcauugaagcacacccaacccaacucgacugaagucagccucacugaaccggaucugagaaucuucucucucugggcuugccagggcucuccgaaccuagcuagcauccucuucaauuccaacuagaaagcuuaccauggacuggaccuggauccuguuccugguggccgccgccaccagagugcacagcgaccagggcugcgccaucaacuucggcaagagagagcugaagugcggcgacggcaucuucaucuucagagacagcgacgacuggcugaacaaguacagcuacuaccccgaggaccccgugaagcuggccagcaucgugaaggccagcuucgaggagggcaagugcggccugaacagcguggacagccuggagcacgagauguggagaagcagagccgacgagaucaacgccaucuucgaggagaacgagguggacaucagcgugguggugcaggaccccaagaacguguaccagagaggcacccaccccuucagcagaaucagagacggccugcaguacggcuggaagaccuggggcaagaaccugguguucagccccggcagaaagaacggcagcuucaucaucgacggcaagagcagaaaggagugccccuucagcaacagaguguggaacagcuuccagaucgaggaguucggcaccggcguguucaccaccagaguguacauggacgccguguucgaguacaccaucgacugcgacggcagcauccugggcgccgccgugaacggcaagaagagcgcccacggcagccccaccuucuggaugggcagccacgaggugaacggcaccuggaugauccacacccuggaggcccuggacuacaaggagugcgaguggccccugacccacaccaucggcaccagcguggaggagagcgagauguucaugcccagaagcaucggcggccccgugagcagccacaaccacauccccggcuacaaggugcagaccaacggccccuggaugcaggugccccuggaggugaagagagaggccugccccggcaccagcgugaucaucgacggcaacugcgacggcagaggcaagagcaccagaagcaccaccgacagcggcaaggugauccccgaguggugcugcagaagcugcaccaugccccccgugagcuuccacggcagcgacggcugcugguaccccauggagaucagacccagaaagacccacgagagccaccuggugagaagcugggugaccgccugaggacuaguacuggcugcaucucccuuuccucuguccuccauccuucucccaggauggugaagggggaccugguacccagugauccccaccccaggauccuaaaucaugacuuaccugcuaauaaaaacucauuggaaaagugagaagaucuaaaaaaaaaaaaaaaaaaaaaaaaaaaaaaaaaaaaaaaaaaaaaaaaaaaaaaaaaaaaaaaaugcaucccccccccccccccccccccccccccccccaaaggcucuuuucagagccaccagaauu

SEQ ID NO: 2453 - RNA, 1716 nt, Artificial Sequence
  mRNA product Design h-5 comprising derived and/or modified sequence from YFV__NC_002031.1__eSS-NS1-Y (polyprotein: aa758-1177) (opt5)
gggagagggcgcuuggcuugcaaggacccugagcugcggcauugaagcacacccaacccaacucgacugaagucagccucacugaaccggaucugagaaucuucucucucugggcuugccagggcucuccgaaccuagcuagcauccucuucaauuccaacuagaaagcuuaccaugagcauguccaugauccuggugggcgucauuaugauguuccucucucuggggguuggagccgaccagggcugcgcuaucaacuuugggaagagagagcuuaaauguggagauggcauuuucaucuuucgggacagcgaugacuggcugaauaaguacuccuauuaccccgaagauccugugaaacucgccucuauugugaaggcgagcuucgaggaagggaaaugcggacugaacuccgucgacucucuugagcacgaaauguggcgcagcagagcugaugagaucaaugccaucuuugaggaaaacgagguggacauuuccguugugguccaagauccgaagaauguguaucagcggggcacccaucccuucagccgcaucagagacggccugcaguacggguggaagacauggggcaaaaaccucguguuuucuccuggacggaagaauggguccuucauuaucgauggaaaaagccgcaaggaaugucccuuuucuaacagaguguggaacuccuuccagauugaggaguuuggcacgggggucuucaccacacggguguauauggacgccguguuugaauacaccaucgauugcgacggaagcauucugggcgcugccgucaauggcaaaaagucugcucacggguccccuacauucuggaugggaagccaugagguuaauggcaccuggaugauccacacacuggaagcccucgacuauaaggagugugaauggccccugacccauacgaucgggaccuccguggaggagucugaaauguucaugccucgcagcauuggaggcccgguguccagccacaaccacauccccggguacaaaguccaaacaaauggaccuuggaugcagguuccccuugagguuaagagagaagcgugcccuggcaccucugugauuaucgauggcaacugugacgggcggggaaaauccacacgcagcaccacggauucuggcaaggucauucccgaguggugcuguagaagcugcacaaugccgccuguguccuuucaugggucugacggauguugguaccccauggaaauccggccucgcaaaacccacgagagccaucugguuagauccugggugacagccggcgagauccacgcuguccccuucgggcucgugagcaugaugauugccauggaagucgugcugcggaagagacagggccccaaacagaugcuuguuggaggcgugguccugcucggggcuaugcuggugggacaaguuaccugaggacuaguacuggcugcaucucccuuuccucuguccuccauccuucucccaggauggugaagggggaccugguacccagugauccccaccccaggauccuaaaucaugacuuaccugcuaauaaaaacucauuggaaaagugagaagaucuaaaaaaaaaaaaaaaaaaaaaaaaaaaaaaaaaaaaaaaaaaaaaaaaaaaaaaaaaaaaaaaaugcaucccccccccccccccccccccccccccccccaaaggcucuuuucagagccaccagaauu

SEQ ID NO: 2454 - RNA, 1575 nt, Artificial Sequence
  mRNA product Design h-5 comprising derived and/or modified sequence from YFV__NC_002031.1__eSS-NS1 (polyprotein: aa758-1130) (opt5)
gggagagggcgcuuggcuugcaaggacccugagcugcggcauugaagcacacccaacccaacucgacugaagucagccucacugaaccggaucugagaaucuucucucucugggcuugccagggcucuccgaaccuagcuagcauccucuucaauuccaacuagaaagcuuaccaugagcauguccaugauccuggugggcgucauuaugauguuccucucucuggggguuggagccgaccagggcugcgcuaucaacuuugggaagagagagcuuaaauguggagauggcauuuucaucuuucgggacagcgaugacuggcugaauaaguacuccuauuaccccgaagauccugugaaacucgccucuauugugaaggcgagcuucgaggaagggaaaugcggacugaacuccgucgacucucuugagcacgaaauguggcgcagcagagcugaugagaucaaugccaucuuugaggaaaacgagguggacauuuccguugugguccaagauccgaagaauguguaucagcggggcacccaucccuucagccgcaucagagacggccugcaguacggguggaagacauggggcaaaaaccucguguuuucuccuggacggaagaauggguccuucauuaucgauggaaaaagccgcaaggaaugucccuuuucuaacagaguguggaacuccuuccagauugaggaguuuggcacgggggucuucaccacacggguguauauggacgccguguuugaauacaccaucgauugcgacggaagcauucugggcgcugccgucaauggcaaaaagucugcucacggguccccuacauucuggaugggaagccaugagguuaauggcaccuggaugauccacacacuggaagcccucgacuauaaggagugugaauggccccugacccauacgaucgggaccuccguggaggagucugaaauguucaugccucgcagcauuggaggcccgguguccagccacaaccacauccccggguacaaaguccaaacaaauggaccuuggaugcagguuccccuugagguuaagagagaagcgugcccuggcaccucugugauuaucgauggcaacugugacgggcggggaaaauccacacgcagcaccacggauucuggcaaggucauucccgaguggugcuguagaagcugcacaaugccgccuguguccuuucaugggucugacggauguugguaccccauggaaauccggccucgcaaaacccacgagagccaucugguuagauccugggugacagccugaggacuaguacuggcugcaucucccuuuccucuguccuccauccuucucccaggauggugaagggggaccugguacccagugauccccaccccaggauccuaaaucaugacuuaccugcuaauaaaaacucauuggaaaagugagaagaucuaaaaaaaaaaaaaaaaaaaaaaaaaaaaaaaaaaaaaaaaaaaaaaaaaaaaaaaaaaaaaaaaugcaucccccccccccccccccccccccccccccccaaaggcucuuuucagagccaccagaauu

SEQ ID NO: 2455 - RNA, 1566 nt, Artificial Sequence
  mRNA product Design h-5 comprising derived and/or modified sequence from YFV__NC_002031.1__SSIgE-NS1 (polyprotein: aa779-1130) (opt5)
gggagagggcgcuuggcuugcaaggacccugagcugcggcauugaagcacacccaacccaacucgacugaagucagccucacugaaccggaucugagaaucuucucucucugggcuugccagggcucuccgaaccuagcuagcauccucuucaauuccaacuagaaagcuuaccauggacuggaccuggauccuguuccucguggccgcugccacaagaguccacagcgaccagggcugcgcuaucaacuuugggaagagagagcuuaaauguggagauggcauuuucaucuuucgggacagcgaugacuggcugaauaaguacuccuauuaccccgaagauccugugaaacucgccucuauugugaaggcgagcuucgaggaagggaaaugcggacugaacuccgucgacucucuugagcacgaaauguggcgcagcagagcugaugagaucaaugccaucuuugaggaaaacgagguggacauuuccguugugguccaagauccgaagaauguguaucagcggggcacccaucccuucagccgcaucagagacggccugcaguacggguggaagacauggggcaaaaaccucguguuuucuccuggacggaagaauggguccuucauuaucgauggaaaaagccgcaaggaaugucccuuuucuaacagaguguggaacuccuuccagauugaggaguuuggcacgggggucuucaccacacggguguauauggacgccguguuugaauacaccaucgauugcgacggaagcauucugggcgcugccgucaauggcaaaaagucugcucacggguccccuacauucuggaugggaagccaugagguuaauggcaccuggaugauccacacacuggaagcccucgacuauaaggagugugaauggccccugacccauacgaucgggaccuccguggaggagucugaaauguucaugccucgcagcauuggaggcccgguguccagccacaaccacauccccggguacaaaguccaaacaaauggaccuuggaugcagguuccccuugagguuaagagagaagcgugcccuggcaccucugugauuaucgauggcaacugugacgggcggggaaaauccacacgcagcaccacggauucuggcaaggucauucccgaguggugcuguagaagcugcacaaugccgccuguguccuuucaugggucugacggauguugguaccccauggaaauccggccucgcaaaacccacgagagccaucugguuagauccugggugacagccugaggacuaguacuggcugcaucucccuuuccucuguccuccauccuucucccaggauggugaagggggaccugguacccagugauccccaccccaggauccuaaaucaugacuuaccugcuaauaaaaacucauuggaaaagugagaagaucuaaaaaaaaaaaaaaaaaaaaaaaaaaaaaaaaaaaaaaaaaaaaaaaaaaaaaaaaaaaaaaaaugcaucccccccccccccccccccccccccccccccaaaggcucuuuucagagccaccagaauu

SEQ ID NO: 2456 - RNA, 1716 nt, Artificial Sequence
  mRNA product Design h-5 comprising derived and/or modified sequence from YFV__NC_002031.1__eSS-NS1-Y (polyprotein: aa758-1177) (opt6)
gggagagggcgcuuggcuugcaaggacccugagcugcggcauugaagcacacccaacccaacucgacugaagucagccucacugaaccggaucugagaaucuucucucucugggcuugccagggcucuccgaaccuagcuagcauccucuucaauuccaacuagaaagcuuaccaugucaaugaguaugauauuaguagggguaauaaugauguuccuuagcuuaggaguaggagcagaucaaggaugugcaauaaauuuuggaaaaagagaacuaaaaugcggagacgguauauuuauauuuagagauagugaugauuggcuaaauaaauauaguuacuauccagaagauccaguuaaauuagccucaauaguaaaagcuagcuuugaagaaggaaaauguggacuaaauucaguagacagucuagaacacgaaauguggagaucaagggcagaugaaauaaaugcaaucuuugaagaaaaugaaguggauauaucagugguaguacaagauccaaaaaauguguaccaaagaggaacacauccauuuaguaggauaagagauggauuacaauauggauggaaaacauggggaaaaaauuuaguauuuaguccaggaagaaaaaauggaucauuuauaauagaugggaaaagccgaaaagaauguccauuuucaaacagaguauggaacucauuucaaauugaagaauuuggaacaggaguauuuacaacaagaguauauauggaugcaguauuugaauacaccauagauugugauggaaguauauuaggagcagcaguaaaugggaaaaaaagcgcucacggaaguccaacguuuuggaugggaucacacgagguaaauggcacguggaugauacauacuuuagaagcauuagauuacaaagaaugugaauggccauuaacucauacaauagguacaagcguagaagaaagugagauguuuaugccacguucaaucggggggccaguaucaagucauaaccauauaccaggauauaaaguacaaacgaauggaccuuggaugcaaguaccacuagaaguaaaacgagaagcaugcccaggaacgucaguaauaauagauggaaauugugauggcagggguaaaagcacaagaucaacaacagauucaggaaaaguaauaccugaaugguguuguagaaguuguacaaugccaccaguaucauuccauggaagugauggaugcugguauccaauggaaauuagaccaagaaaaacucaugaaagucauuuaguaagaucuuggguaacugcaggagaaauacaugcaguaccauuugguuuaguaaguaugaugauagcaauggaaguaguucuaagaaaaaggcaagggccuaaacaaaugcuagugggaggaguaguauugcuaggugcaauguuaguaggccaaguaaccugaggacuaguacuggcugcaucucccuuuccucuguccuccauccuucucccaggauggugaagggggaccugguacccagugauccccaccccaggauccuaaaucaugacuuaccugcuaauaaaaacucauuggaaaagugagaagaucuaaaaaaaaaaaaaaaaaaaaaaaaaaaaaaaaaaaaaaaaaaaaaaaaaaaaaaaaaaaaaaaaugcaucccccccccccccccccccccccccccccccaaaggcucuuuucagagccaccagaauu

SEQ ID NO: 2457 - RNA, 1575 nt, Artificial Sequence
  mRNA product Design h-5 comprising derived and/or modified sequence from YFV__NC_002031.1__eSS-NS1 (polyprotein: aa758-1130) (opt6)
gggagagggcgcuuggcuugcaaggacccugagcugcggcauugaagcacacccaacccaacucgacugaagucagccucacugaaccggaucugagaaucuucucucucugggcuugccagggcucuccgaaccuagcuagcauccucuucaauuccaacuagaaagcuuaccaugucaaugaguaugauauuaguagggguaauaaugauguuccuuagcuuaggaguaggagcagaucaaggaugugcaauaaauuuuggaaaaagagaacuaaaaugcggagacgguauauuuauauuuagagauagugaugauuggcuaaauaaauauaguuacuauccagaagauccaguuaaauuagccucaauaguaaaagcuagcuuugaagaaggaaaauguggacuaaauucaguagacagucuagaacacgaaauguggagaucaagggcagaugaaauaaaugcaaucuuugaagaaaaugaaguggauauaucagugguaguacaagauccaaaaaauguguaccaaagaggaacacauccauuuaguaggauaagagauggauuacaauauggauggaaaacauggggaaaaaauuuaguauuuaguccaggaagaaaaaauggaucauuuauaauagaugggaaaagccgaaaagaauguccauuuucaaacagaguauggaacucauuucaaauugaagaauuuggaacaggaguauuuacaacaagaguauauauggaugcaguauuugaauacaccauagauugugauggaaguauauuaggagcagcaguaaaugggaaaaaaagcgcucacggaaguccaacguuuuggaugggaucacacgagguaaauggcacguggaugauacauacuuuagaagcauuagauuacaaagaaugugaauggccauuaacucauacaauagguacaagcguagaagaaagugagauguuuaugccacguucaaucggggggccaguaucaagucauaaccauauaccaggauauaaaguacaaacgaauggaccuuggaugcaaguaccacuagaaguaaaacgagaagcaugcccaggaacgucaguaauaauagauggaaauugugauggcagggguaaaagcacaagaucaacaacagauucaggaaaaguaauaccugaaugguguuguagaaguuguacaaugccaccaguaucauuccauggaagugauggaugcugguauccaauggaaauuagaccaagaaaaacucaugaaagucauuuaguaagaucuuggguaacugcaugaggacuaguacuggcugcaucucccuuuccucuguccuccauccuucucccaggauggugaagggggaccugguacccagugauccccaccccaggauccuaaaucaugacuuaccugcuaauaaaaacucauuggaaaagugagaagaucuaaaaaaaaaaaaaaaaaaaaaaaaaaaaaaaaaaaaaaaaaaaaaaaaaaaaaaaaaaaaaaaaugcaucccccccccccccccccccccccccccccccaaaggcucuuuucagagccaccagaauu

SEQ ID NO: 2458 - RNA, 1566 nt, Artificial Sequence
  mRNA product Design h-5 comprising derived and/or modified sequence from YFV__NC_002031.1__SSIgE-NS1 (polyprotein: aa779-1130) (opt6)
gggagagggcgcuuggcuugcaaggacccugagcugcggcauugaagcacacccaacccaacucgacugaagucagccucacugaaccggaucugagaaucuucucucucugggcuugccagggcucuccgaaccuagcuagcauccucuucaauuccaacuagaaagcuuaccauggacuggacauggauauuauuuuuaguagcagcagcaacaagaguacauucagaucaaggaugugcaauaaauuuuggaaaaagagaacuaaaaugcggagacgguauauuuauauuuagagauagugaugauuggcuaaauaaauauaguuacuauccagaagauccaguuaaauuagccucaauaguaaaagcuagcuuugaagaaggaaaauguggacuaaauucaguagacagucuagaacacgaaauguggagaucaagggcagaugaaauaaaugcaaucuuugaagaaaaugaaguggauauaucagugguaguacaagauccaaaaaauguguaccaaagaggaacacauccauuuaguaggauaagagauggauuacaauauggauggaaaacauggggaaaaaauuuaguauuuaguccaggaagaaaaaauggaucauuuauaauagaugggaaaagccgaaaagaauguccauuuucaaacagaguauggaacucauuucaaauugaagaauuuggaacaggaguauuuacaacaagaguauauauggaugcaguauuugaauacaccauagauugugauggaaguauauuaggagcagcaguaaaugggaaaaaaagcgcucacggaaguccaacguuuuggaugggaucacacgagguaaauggcacguggaugauacauacuuuagaagcauuagauuacaaagaaugugaauggccauuaacucauacaauagguacaagcguagaagaaagugagauguuuaugccacguucaaucggggggccaguaucaagucauaaccauauaccaggauauaaaguacaaacgaauggaccuuggaugcaaguaccacuagaaguaaaacgagaagcaugcccaggaacgucaguaauaauagauggaaauugugauggcagggguaaaagcacaagaucaacaacagauucaggaaaaguaauaccugaaugguguuguagaaguuguacaaugccaccaguaucauuccauggaagugauggaugcugguauccaauggaaauuagaccaagaaaaacucaugaaagucauuuaguaagaucuuggguaacugcaugaggacuaguacuggcugcaucucccuuuccucuguccuccauccuucucccaggauggugaagggggaccugguacccagugauccccaccccaggauccuaaaucaugacuuaccugcuaauaaaaacucauuggaaaagugagaagaucuaaaaaaaaaaaaaaaaaaaaaaaaaaaaaaaaaaaaaaaaaaaaaaaaaaaaaaaaaaaaaaaaugcaucccccccccccccccccccccccccccccccaaaggcucuuuucagagccaccagaauu

SEQ ID NO: 2459 - RNA, 1716 nt, Artificial Sequence
  mRNA product Design h-5 comprising derived and/or modified sequence from YFV__NC_002031.1__eSS-NS1-Y (polyprotein: aa758-1177) (opt11)
gggagagggcgcuuggcuugcaaggacccugagcugcggcauugaagcacacccaacccaacucgacugaagucagccucacugaaccggaucugagaaucuucucucucugggcuugccagggcucuccgaaccuagcuagcauccucuucaauuccaacuagaaagcuuaccaugagcaugagcaugaucuugguaggggucauaaugauguucuugagccuagggguaggcgcagaccagggaugcgcgauaaacuucggcaaacgcgaacucaaaugcggggacggaaucuucaucuuucgcgacagugacgacuggcuaaacaaguacaguuacuacccggaagaccccguaaaacuagccucaauaguaaaagcgagcuucgaagaaggaaagugcgggcuaaacagcguggacucccuagagcacgagauguggaggucgagagcggacgagaucaacgccauauucgaagaaaaugaaguagacauaagcguagucguacaagaucccaaaaacguguaccagcgcggaacccaccccuucagcaggaucagagacgggcuacaauacggauggaagacauggggcaaaaaccuggucuucagcccgggcaggaaaaacggaucguucaucaucgauggcaaaagccgaaaggagugcccguucucaaacaggguauggaacucguuccagaucgaagaguucggcacaggcgucuucacgacaagagucuacauggacgcaguguucgaauacacaaucgacugcgacggcuccauacugggcgcagccgugaacgggaaaaagagcgcacacggaagcccgaccuuuuggauggguucgcacgaggugaacggaacauggaugauacacaccuuagaagcacucgauuacaaagaaugcgaauggcccuuaacccacaccaucgguacguccguagaagaaagcgaaauguucaugccgcgcucaaucggcggcccagucucgagccacaaccacaucccgggcuauaaaguacaaacaaacgggccauggaugcagguaccccucgaggucaagcgcgaagccugccccggaaccucggucaucaucgacggcaacugcgacggcaggggaaaaagcacgcgcucaaccacggacucgggaaagguaauaccagaguggugcugcaggagcugcaccaugccaccgguaucguuccacggcucagacggaugcugguacccgauggaaaucagacccagaaaaacgcacgagagccaccucguacgcucauggguaaccgcaggcgagauccacgccgugccauuuggacuggucucaaugaugauagcgauggaggucgugcucaggaagaggcaagggcccaagcaaaugcucguaggaggaguaguacuccugggcgcaaugcuggucggacaggugaccugaggacuaguacuggcugcaucucccuuuccucuguccuccauccuucucccaggauggugaagggggaccugguacccagugauccccaccccaggauccuaaaucaugacuuaccugcuaauaaaaacucauuggaaaagugagaagaucuaaaaaaaaaaaaaaaaaaaaaaaaaaaaaaaaaaaaaaaaaaaaaaaaaaaaaaaaaaaaaaaaugcaucccccccccccccccccccccccccccccccaaaggcucuuuucagagccaccagaauu

SEQ ID NO: 2460 - RNA, 1575 nt, Artificial Sequence
  mRNA product Design h-5 comprising derived and/or modified sequence from YFV__NC_002031.1__eSS-NS1 (polyprotein: aa758-1130) (opt11)
gggagagggcgcuuggcuugcaaggacccugagcugcggcauugaagcacacccaacccaacucgacugaagucagccucacugaaccggaucugagaaucuucucucucugggcuugccagggcucuccgaaccuagcuagcauccucuucaauuccaacuagaaagcuuaccaugagcaugagcaugaucuugguaggggucauaaugauguucuugagccuagggguaggcgcagaccagggaugcgcgauaaacuucggcaaacgcgaacucaaaugcggggacggaaucuucaucuuucgcgacagugacgacuggcuaaacaaguacaguuacuacccggaagaccccguaaaacuagccucaauaguaaaagcgagcuucgaagaaggaaagugcgggcuaaacagcguggacucccuagagcacgagauguggaggucgagagcggacgagaucaacgccauauucgaagaaaaugaaguagacauaagcguagucguacaagaucccaaaaacguguaccagcgcggaacccaccccuucagcaggaucagagacgggcuacaauacggauggaagacauggggcaaaaaccuggucuucagcccgggcaggaaaaacggaucguucaucaucgauggcaaaagccgaaaggagugcccguucucaaacaggguauggaacucguuccagaucgaagaguucggcacaggcgucuucacgacaagagucuacauggacgcaguguucgaauacacaaucgacugcgacggcuccauacugggcgcagccgugaacgggaaaaagagcgcacacggaagcccgaccuuuuggauggguucgcacgaggugaacggaacauggaugauacacaccuuagaagcacucgauuacaaagaaugcgaauggcccuuaacccacaccaucgguacguccguagaagaaagcgaaauguucaugccgcgcucaaucggcggcccagucucgagccacaaccacaucccgggcuauaaaguacaaacaaacgggccauggaugcagguaccccucgaggucaagcgcgaagccugccccggaaccucggucaucaucgacggcaacugcgacggcaggggaaaaagcacgcgcucaaccacggacucgggaaagguaauaccagaguggugcugcaggagcugcaccaugccaccgguaucguuccacggcucagacggaugcugguacccgauggaaaucagacccagaaaaacgcacgagagccaccucguacgcucauggguaaccgcaugaggacuaguacuggcugcaucucccuuuccucuguccuccauccuucucccaggauggugaagggggaccugguacccagugauccccaccccaggauccuaaaucaugacuuaccugcuaauaaaaacucauuggaaaagugagaagaucuaaaaaaaaaaaaaaaaaaaaaaaaaaaaaaaaaaaaaaaaaaaaaaaaaaaaaaaaaaaaaaaaugcaucccccccccccccccccccccccccccccccaaaggcucuuuucagagccaccagaauu

SEQ ID NO: 2461 - RNA, 1566 nt, Artificial Sequence
  mRNA product Design h-5 comprising derived and/or modified sequence from YFV__NC_002031.1__SSIgE-NS1 (polyprotein: aa779-1130) (opt11)
gggagagggcgcuuggcuugcaaggacccugagcugcggcauugaagcacacccaacccaacucgacugaagucagccucacugaaccggaucugagaaucuucucucucugggcuugccagggcucuccgaaccuagcuagcauccucuucaauuccaacuagaaagcuuaccauggauuggacguggauacucuuucucguggccgcggccacgcgcgugcacucggaccagggaugcgcgauaaacuucggcaaacgcgaacucaaaugcggggacggaaucuucaucuuucgcgacagugacgacuggcuaaacaaguacaguuacuacccggaagaccccguaaaacuagccucaauaguaaaagcgagcuucgaagaaggaaagugcgggcuaaacagcguggacucccuagagcacgagauguggaggucgagagcggacgagaucaacgccauauucgaagaaaaugaaguagacauaagcguagucguacaagaucccaaaaacguguaccagcgcggaacccaccccuucagcaggaucagagacgggcuacaauacggauggaagacauggggcaaaaaccuggucuucagcccgggcaggaaaaacggaucguucaucaucgauggcaaaagccgaaaggagugcccguucucaaacaggguauggaacucguuccagaucgaagaguucggcacaggcgucuucacgacaagagucuacauggacgcaguguucgaauacacaaucgacugcgacggcuccauacugggcgcagccgugaacgggaaaaagagcgcacacggaagcccgaccuuuuggauggguucgcacgaggugaacggaacauggaugauacacaccuuagaagcacucgauuacaaagaaugcgaauggcccuuaacccacaccaucgguacguccguagaagaaagcgaaauguucaugccgcgcucaaucggcggcccagucucgagccacaaccacaucccgggcuauaaaguacaaacaaacgggccauggaugcagguaccccucgaggucaagcgcgaagccugccccggaaccucggucaucaucgacggcaacugcgacggcaggggaaaaagcacgcgcucaaccacggacucgggaaagguaauaccagaguggugcugcaggagcugcaccaugccaccgguaucguuccacggcucagacggaugcugguacccgauggaaaucagacccagaaaaacgcacgagagccaccucguacgcucauggguaaccgcaugaggacuaguacuggcugcaucucccuuuccucuguccuccauccuucucccaggauggugaagggggaccugguacccagugauccccaccccaggauccuaaaucaugacuuaccugcuaauaaaaacucauuggaaaagugagaagaucuaaaaaaaaaaaaaaaaaaaaaaaaaaaaaaaaaaaaaaaaaaaaaaaaaaaaaaaaaaaaaaaaugcaucccccccccccccccccccccccccccccccaaaggcucuuuucagagccaccagaauu

SEQ ID NO: 2462 - RNA, 1645 nt, Artificial Sequence
  mRNA product Design i-2 comprising derived and/or modified sequence from YFV__NC_002031.1__eSS-NS1-Y (polyprotein: aa758-1177) (wt)
ggggcgcugccuacggagguggcagccaucuccuucucggcaucaagcuuaccauguccaugagcaugaucuugguaggagugaucaugauguuuuugucucuaggaguuggggcggaucaaggaugcgccaucaacuuuggcaagagagagcucaagugcggagaugguaucuucauauuuagagacucugaugacuggcugaacaaguacucauacuauccagaagauccugugaagcuugcaucaauagugaaagccucuuuugaagaagggaaguguggccuaaauucaguugacucccuugagcaugagauguggagaagcagggcagaugagaucaaugccauuuuugaggaaaacgagguggacauuucuguugucgugcaggauccaaagaauguuuaccagagaggaacucauccauuuuccagaauucgggauggucugcaguaugguuggaagacuugggguaagaaccuuguguucuccccagggaggaagaauggaagcuucaucauagauggaaaguccaggaaagaaugcccguuuucaaaccgggucuggaauucuuuccagauagaggaguuugggacgggaguguucaccacacgcguguacauggacgcagucuuugaauacaccauagacugcgauggaucuaucuugggugcagcggugaacggaaaaaagagugcccauggcucuccaacauuuuggaugggaagucaugaaguaaaugggacauggaugauccacaccuuggaggcauuagauuacaaggagugugaguggccacugacacauacgauuggaacaucaguugaagagagugaaauguucaugccgagaucaaucggaggcccaguuagcucucacaaucauaucccuggauacaagguucagacgaacggaccuuggaugcagguaccacuagaagugaagagagaagcuugcccagggacuagcgugaucauugauggcaacugugauggacggggaaaaucaaccagauccaccacggauagcgggaaaguuauuccugaaugguguugccgcuccugcacaaugccgccugugagcuuccaugguagugauggguguugguaucccauggaaauuaggccaaggaaaacgcaugaaagccaucuggugcgcuccuggguuacagcuggagaaauacaugcugucccuuuugguuuggugagcaugaugauagcaauggaagugguccuaaggaaaagacagggaccaaagcaaauguugguuggaggaguagugcucuugggagcaaugcuggucgggcaaguaacuugaggacuagugcaucacauuuaaaagcaucucagccuaccaugagaauaagagaaagaaaaugaagaucaauagcuuauucaucucuuuuucuuuuucguugguguaaagccaacacccugucuaaaaaacauaaauuucuuuaaucauuuugccucuuuucucugugcuucaauuaauaaaaaauggaaagaaccuagaucuaaaaaaaaaaaaaaaaaaaaaaaaaaaaaaaaaaaaaaaaaaaaaaaaaaaaaaaaaaaaaaaaugcaucccccccccccccccccccccccccccccccaaaggcucuuuucagagccaccagaauu

SEQ ID NO: 2463 - RNA, 1504 nt, Artificial Sequence
  mRNA product Design i-2 comprising derived and/or modified sequence from YFV__NC_002031.1__eSS-NS1 (polyprotein: aa758-1130) (wt)
ggggcgcugccuacggagguggcagccaucuccuucucggcaucaagcuuaccauguccaugagcaugaucuugguaggagugaucaugauguuuuugucucuaggaguuggggcggaucaaggaugcgccaucaacuuuggcaagagagagcucaagugcggagaugguaucuucauauuuagagacucugaugacuggcugaacaaguacucauacuauccagaagauccugugaagcuugcaucaauagugaaagccucuuuugaagaagggaaguguggccuaaauucaguugacucccuugagcaugagauguggagaagcagggcagaugagaucaaugccauuuuugaggaaaacgagguggacauuucuguugucgugcaggauccaaagaauguuuaccagagaggaacucauccauuuuccagaauucgggauggucugcaguaugguuggaagacuugggguaagaaccuuguguucuccccagggaggaagaauggaagcuucaucauagauggaaaguccaggaaagaaugcccguuuucaaaccgggucuggaauucuuuccagauagaggaguuugggacgggaguguucaccacacgcguguacauggacgcagucuuugaauacaccauagacugcgauggaucuaucuugggugcagcggugaacggaaaaaagagugcccauggcucuccaacauuuuggaugggaagucaugaaguaaaugggacauggaugauccacaccuuggaggcauuagauuacaaggagugugaguggccacugacacauacgauuggaacaucaguugaagagagugaaauguucaugccgagaucaaucggaggcccaguuagcucucacaaucauaucccuggauacaagguucagacgaacggaccuuggaugcagguaccacuagaagugaagagagaagcuugcccagggacuagcgugaucauugauggcaacugugauggacggggaaaaucaaccagauccaccacggauagcgggaaaguuauuccugaaugguguugccgcuccugcacaaugccgccugugagcuuccaugguagugauggguguugguaucccauggaaauuaggccaaggaaaacgcaugaaagccaucuggugcgcuccuggguuacagcuugaggacuagugcaucacauuuaaaagcaucucagccuaccaugagaauaagagaaagaaaaugaagaucaauagcuuauucaucucuuuuucuuuuucguugguguaaagccaacacccugucuaaaaaacauaaauuucuuuaaucauuuugccucuuuucucugugcuucaauuaauaaaaaauggaaagaaccuagaucuaaaaaaaaaaaaaaaaaaaaaaaaaaaaaaaaaaaaaaaaaaaaaaaaaaaaaaaaaaaaaaaaugcaucccccccccccccccccccccccccccccccaaaggcucuuuucagagccaccagaauu

SEQ ID NO: 2464 - RNA, 1495 nt, Artificial Sequence
  mRNA product Design i-2 comprising derived and/or modified sequence from YFV__NC_002031.1__SSIgE-NS1 (polyprotein: aa779-1130) (wt)
ggggcgcugccuacggagguggcagccaucuccuucucggcaucaagcuuaccauggacuggaccuggauccuguuccucguggccgccgcgacccgcguccacagcgaucaaggaugcgccaucaacuuuggcaagagagagcucaagugcggagaugguaucuucauauuuagagacucugaugacuggcugaacaaguacucauacuauccagaagauccugugaagcuugcaucaauagugaaagccucuuuugaagaagggaaguguggccuaaauucaguugacucccuugagcaugagauguggagaagcagggcagaugagaucaaugccauuuuugaggaaaacgagguggacauuucuguugucgugcaggauccaaagaauguuuaccagagaggaacucauccauuuuccagaauucgggauggucugcaguaugguuggaagacuugggguaagaaccuuguguucuccccagggaggaagaauggaagcuucaucauagauggaaaguccaggaaagaaugcccguuuucaaaccgggucuggaauucuuuccagauagaggaguuugggacgggaguguucaccacacgcguguacauggacgcagucuuugaauacaccauagacugcgauggaucuaucuugggugcagcggugaacggaaaaaagagugcccauggcucuccaacauuuuggaugggaagucaugaaguaaaugggacauggaugauccacaccuuggaggcauuagauuacaaggagugugaguggccacugacacauacgauuggaacaucaguugaagagagugaaauguucaugccgagaucaaucggaggcccaguuagcucucacaaucauaucccuggauacaagguucagacgaacggaccuuggaugcagguaccacuagaagugaagagagaagcuugcccagggacuagcgugaucauugauggcaacugugauggacggggaaaaucaaccagauccaccacggauagcgggaaaguuauuccugaaugguguugccgcuccugcacaaugccgccugugagcuuccaugguagugauggguguugguaucccauggaaauuaggccaaggaaaacgcaugaaagccaucuggugcgcuccuggguuacagcuugaggacuagugcaucacauuuaaaagcaucucagccuaccaugagaauaagagaaagaaaaugaagaucaauagcuuauucaucucuuuuucuuuuucguugguguaaagccaacacccugucuaaaaaacauaaauuucuuuaaucauuuugccucuuuucucugugcuucaauuaauaaaaaauggaaagaaccuagaucuaaaaaaaaaaaaaaaaaaaaaaaaaaaaaaaaaaaaaaaaaaaaaaaaaaaaaaaaaaaaaaaaugcaucccccccccccccccccccccccccccccccaaaggcucuuuucagagccaccagaauu

SEQ ID NO: 2465 - RNA, 1645 nt, Artificial Sequence
  mRNA product Design i-2 comprising derived and/or modified sequence from YFV__NC_002031.1__eSS-NS1-Y (polyprotein: aa758-1177) (opt1)
ggggcgcugccuacggagguggcagccaucuccuucucggcaucaagcuuaccaugagcauguccaugauccuggugggcgucaucaugauguuccucagccugggggugggcgccgaccaggggugcgccaucaacuucggcaagcgcgagcugaagugcggggacggcaucuucaucuuccgggacuccgacgacuggcucaacaaguacagcuacuaccccgaggacccggugaagcuggcguccaucgucaaggccagcuucgaggagggcaagugcgggcugaacuccguggacagccucgagcacgagauguggcgcucccgggccgacgagaucaacgccaucuucgaggagaacgagguggacaucagcgucguggugcaggaccccaagaacgucuaccagcgcggcacccaccccuucucccggauccgcgacgggcugcaguacggcuggaagaccugggggaagaaccugguguucagccccggccggaagaacggcuccuucaucaucgacggcaagagccgcaaggagugcccguucuccaaccggguguggaacagcuuccagaucgaggaguucgggacgggggucuucaccacccgcguguacauggacgccguguucgaguacaccaucgacugcgacggcuccauccucggcgcggccgucaacgggaagaaguccgcccacggcagccccacguucuggauggggagccacgaggugaacggcaccuggaugauccacacccuggaggcccuggacuacaaggagugcgaguggccccucacccacacgaucgggaccagcguggaggaguccgagauguucaugccccggagcaucggcggcccggucuccagccacaaccacauccccggguacaaggugcagaccaacggccccuggaugcaggucccccuggaggugaagcgcgaggcgugcccggggaccuccgugaucaucgacggcaacugcgacgggcggggcaagagcacgcgcuccaccaccgacagcggcaaggugauccccgaguggugcugccgguccugcaccaugccgcccgucagcuuccacggguccgacggcugcugguaccccauggagauccgcccccggaagacgcacgagagccaccuggugcgcuccugggucaccgccggggagauccacgccgugcccuucggccucgugagcaugaugaucgccauggaggucgugcugcggaagcgccaggggcccaagcagaugcuggugggcggcgucgugcuccugggggccaugcuggugggccaggucaccugaggacuagugcaucacauuuaaaagcaucucagccuaccaugagaauaagagaaagaaaaugaagaucaauagcuuauucaucucuuuuucuuuuucguugguguaaagccaacacccugucuaaaaaacauaaauuucuuuaaucauuuugccucuuuucucugugcuucaauuaauaaaaaauggaaagaaccuagaucuaaaaaaaaaaaaaaaaaaaaaaaaaaaaaaaaaaaaaaaaaaaaaaaaaaaaaaaaaaaaaaaaugcaucccccccccccccccccccccccccccccccaaaggcucuuuucagagccaccagaauu

SEQ ID NO: 2466 - RNA, 1504 nt, Artificial Sequence
  mRNA product Design i-2 comprising derived and/or modified sequence from YFV__NC_002031.1__eSS-NS1 (polyprotein: aa758-1130) (opt1)
ggggcgcugccuacggagguggcagccaucuccuucucggcaucaagcuuaccaugagcauguccaugauccuggugggcgucaucaugauguuccucagccugggggugggcgccgaccaggggugcgccaucaacuucggcaagcgcgagcugaagugcggggacggcaucuucaucuuccgggacuccgacgacuggcucaacaaguacagcuacuaccccgaggacccggugaagcuggcguccaucgucaaggccagcuucgaggagggcaagugcgggcugaacuccguggacagccucgagcacgagauguggcgcucccgggccgacgagaucaacgccaucuucgaggagaacgagguggacaucagcgucguggugcaggaccccaagaacgucuaccagcgcggcacccaccccuucucccggauccgcgacgggcugcaguacggcuggaagaccugggggaagaaccugguguucagccccggccggaagaacggcuccuucaucaucgacggcaagagccgcaaggagugcccguucuccaaccggguguggaacagcuuccagaucgaggaguucgggacgggggucuucaccacccgcguguacauggacgccguguucgaguacaccaucgacugcgacggcuccauccucggcgcggccgucaacgggaagaaguccgcccacggcagccccacguucuggauggggagccacgaggugaacggcaccuggaugauccacacccuggaggcccuggacuacaaggagugcgaguggccccucacccacacgaucgggaccagcguggaggaguccgagauguucaugccccggagcaucggcggcccggucuccagccacaaccacauccccggguacaaggugcagaccaacggccccuggaugcaggucccccuggaggugaagcgcgaggcgugcccggggaccuccgugaucaucgacggcaacugcgacgggcggggcaagagcacgcgcuccaccaccgacagcggcaaggugauccccgaguggugcugccgguccugcaccaugccgcccgucagcuuccacggguccgacggcugcugguaccccauggagauccgcccccggaagacgcacgagagccaccuggugcgcuccugggucaccgccugaggacuagugcaucacauuuaaaagcaucucagccuaccaugagaauaagagaaagaaaaugaagaucaauagcuuauucaucucuuuuucuuuuucguugguguaaagccaacacccugucuaaaaaacauaaauuucuuuaaucauuuugccucuuuucucugugcuucaauuaauaaaaaauggaaagaaccuagaucuaaaaaaaaaaaaaaaaaaaaaaaaaaaaaaaaaaaaaaaaaaaaaaaaaaaaaaaaaaaaaaaaugcaucccccccccccccccccccccccccccccccaaaggcucuuuucagagccaccagaauu

SEQ ID NO: 2467 - RNA, 1495 nt, Artificial Sequence
  mRNA product Design i-2 comprising derived and/or modified sequence from YFV__NC_002031.1__SSIgE-NS1 (polyprotein: aa779-1130) (opt1)
ggggcgcugccuacggagguggcagccaucuccuucucggcaucaagcuuaccauggacuggaccuggauccuguuccucguggccgccgcgacccgcguccacagcgaccaggggugcgccaucaacuucggcaagcgcgagcugaagugcggggacggcaucuucaucuuccgggacuccgacgacuggcucaacaaguacagcuacuaccccgaggacccggugaagcuggcguccaucgucaaggccagcuucgaggagggcaagugcgggcugaacuccguggacagccucgagcacgagauguggcgcucccgggccgacgagaucaacgccaucuucgaggagaacgagguggacaucagcgucguggugcaggaccccaagaacgucuaccagcgcggcacccaccccuucucccggauccgcgacgggcugcaguacggcuggaagaccugggggaagaaccugguguucagccccggccggaagaacggcuccuucaucaucgacggcaagagccgcaaggagugcccguucuccaaccggguguggaacagcuuccagaucgaggaguucgggacgggggucuucaccacccgcguguacauggacgccguguucgaguacaccaucgacugcgacggcuccauccucggcgcggccgucaacgggaagaaguccgcccacggcagccccacguucuggauggggagccacgaggugaacggcaccuggaugauccacacccuggaggcccuggacuacaaggagugcgaguggccccucacccacacgaucgggaccagcguggaggaguccgagauguucaugccccggagcaucggcggcccggucuccagccacaaccacauccccggguacaaggugcagaccaacggccccuggaugcaggucccccuggaggugaagcgcgaggcgugcccggggaccuccgugaucaucgacggcaacugcgacgggcggggcaagagcacgcgcuccaccaccgacagcggcaaggugauccccgaguggugcugccgguccugcaccaugccgcccgucagcuuccacggguccgacggcugcugguaccccauggagauccgcccccggaagacgcacgagagccaccuggugcgcuccugggucaccgccugaggacuagugcaucacauuuaaaagcaucucagccuaccaugagaauaagagaaagaaaaugaagaucaauagcuuauucaucucuuuuucuuuuucguugguguaaagccaacacccugucuaaaaaacauaaauuucuuuaaucauuuugccucuuuucucugugcuucaauuaauaaaaaauggaaagaaccuagaucuaaaaaaaaaaaaaaaaaaaaaaaaaaaaaaaaaaaaaaaaaaaaaaaaaaaaaaaaaaaaaaaaugcaucccccccccccccccccccccccccccccccaaaggcucuuuucagagccaccagaauu

SEQ ID NO: 2468 - RNA, 1645 nt, Artificial Sequence
  mRNA product Design i-2 comprising derived and/or modified sequence from YFV__NC_002031.1__eSS-NS1-Y (polyprotein: aa758-1177) (opt2)
ggggcgcugccuacggagguggcagccaucuccuucucggcaucaagcuuaccauguccauguccaugauccucgucggcgucaucaugauguuccucucccucggcgucggcgccgaccagggcugcgccaucaacuucggcaagcgcgagcucaagugcggcgacggcaucuucaucuuccgcgacuccgacgacuggcucaacaaguacuccuacuaccccgaggaccccgucaagcucgccuccaucgucaaggccuccuucgaggagggcaagugcggccucaacuccgucgacucccucgagcacgagauguggcgcucccgcgccgacgagaucaacgccaucuucgaggagaacgaggucgacaucuccgucgucguccaggaccccaagaacgucuaccagcgcggcacccaccccuucucccgcauccgcgacggccuccaguacggcuggaagaccuggggcaagaaccucgucuucucccccggccgcaagaacggcuccuucaucaucgacggcaagucccgcaaggagugccccuucuccaaccgcgucuggaacuccuuccagaucgaggaguucggcaccggcgucuucaccacccgcgucuacauggacgccgucuucgaguacaccaucgacugcgacggcuccauccucggcgccgccgucaacggcaagaaguccgcccacggcucccccaccuucuggaugggcucccacgaggucaacggcaccuggaugauccacacccucgaggcccucgacuacaaggagugcgaguggccccucacccacaccaucggcaccuccgucgaggaguccgagauguucaugccccgcuccaucggcggccccgucuccucccacaaccacauccccggcuacaagguccagaccaacggccccuggaugcaggucccccucgaggucaagcgcgaggccugccccggcaccuccgucaucaucgacggcaacugcgacggccgcggcaaguccacccgcuccaccaccgacuccggcaaggucauccccgaguggugcugccgcuccugcaccaugccccccgucuccuuccacggcuccgacggcugcugguaccccauggagauccgcccccgcaagacccacgagucccaccucguccgcuccugggucaccgccggcgagauccacgccguccccuucggccucgucuccaugaugaucgccauggaggucguccuccgcaagcgccagggccccaagcagaugcucgucggcggcgucguccuccucggcgccaugcucgucggccaggucaccugaggacuagugcaucacauuuaaaagcaucucagccuaccaugagaauaagagaaagaaaaugaagaucaauagcuuauucaucucuuuuucuuuuucguugguguaaagccaacacccugucuaaaaaacauaaauuucuuuaaucauuuugccucuuuucucugugcuucaauuaauaaaaaauggaaagaaccuagaucuaaaaaaaaaaaaaaaaaaaaaaaaaaaaaaaaaaaaaaaaaaaaaaaaaaaaaaaaaaaaaaaaugcaucccccccccccccccccccccccccccccccaaaggcucuuuucagagccaccagaauu

SEQ ID NO: 2469 - RNA, 1504 nt, Artificial Sequence
  mRNA product Design i-2 comprising derived and/or modified sequence from YFV__NC_002031.1__eSS-NS1 (polyprotein: aa758-1130) (opt2)
ggggcgcugccuacggagguggcagccaucuccuucucggcaucaagcuuaccauguccauguccaugauccucgucggcgucaucaugauguuccucucccucggcgucggcgccgaccagggcugcgccaucaacuucggcaagcgcgagcucaagugcggcgacggcaucuucaucuuccgcgacuccgacgacuggcucaacaaguacuccuacuaccccgaggaccccgucaagcucgccuccaucgucaaggccuccuucgaggagggcaagugcggccucaacuccgucgacucccucgagcacgagauguggcgcucccgcgccgacgagaucaacgccaucuucgaggagaacgaggucgacaucuccgucgucguccaggaccccaagaacgucuaccagcgcggcacccaccccuucucccgcauccgcgacggccuccaguacggcuggaagaccuggggcaagaaccucgucuucucccccggccgcaagaacggcuccuucaucaucgacggcaagucccgcaaggagugccccuucuccaaccgcgucuggaacuccuuccagaucgaggaguucggcaccggcgucuucaccacccgcgucuacauggacgccgucuucgaguacaccaucgacugcgacggcuccauccucggcgccgccgucaacggcaagaaguccgcccacggcucccccaccuucuggaugggcucccacgaggucaacggcaccuggaugauccacacccucgaggcccucgacuacaaggagugcgaguggccccucacccacaccaucggcaccuccgucgaggaguccgagauguucaugccccgcuccaucggcggccccgucuccucccacaaccacauccccggcuacaagguccagaccaacggccccuggaugcaggucccccucgaggucaagcgcgaggccugccccggcaccuccgucaucaucgacggcaacugcgacggccgcggcaaguccacccgcuccaccaccgacuccggcaaggucauccccgaguggugcugccgcuccugcaccaugccccccgucuccuuccacggcuccgacggcugcugguaccccauggagauccgcccccgcaagacccacgagucccaccucguccgcuccugggucaccgccugaggacuagugcaucacauuuaaaagcaucucagccuaccaugagaauaagagaaagaaaaugaagaucaauagcuuauucaucucuuuuucuuuuucguugguguaaagccaacacccugucuaaaaaacauaaauuucuuuaaucauuuugccucuuuucucugugcuucaauuaauaaaaaauggaaagaaccuagaucuaaaaaaaaaaaaaaaaaaaaaaaaaaaaaaaaaaaaaaaaaaaaaaaaaaaaaaaaaaaaaaaaugcaucccccccccccccccccccccccccccccccaaaggcucuuuucagagccaccagaauu

SEQ ID NO: 2470 - RNA, 1495 nt, Artificial Sequence
  mRNA product Design i-2 comprising derived and/or modified sequence from YFV__NC_002031.1__SSIgE-NS1 (polyprotein: aa779-1130) (opt2)
ggggcgcugccuacggagguggcagccaucuccuucucggcaucaagcuuaccauggacuggaccuggauccucuuccucgucgccgccgccacccgcguccacuccgaccagggcugcgccaucaacuucggcaagcgcgagcucaagugcggcgacggcaucuucaucuuccgcgacuccgacgacuggcucaacaaguacuccuacuaccccgaggaccccgucaagcucgccuccaucgucaaggccuccuucgaggagggcaagugcggccucaacuccgucgacucccucgagcacgagauguggcgcucccgcgccgacgagaucaacgccaucuucgaggagaacgaggucgacaucuccgucgucguccaggaccccaagaacgucuaccagcgcggcacccaccccuucucccgcauccgcgacggccuccaguacggcuggaagaccuggggcaagaaccucgucuucucccccggccgcaagaacggcuccuucaucaucgacggcaagucccgcaaggagugccccuucuccaaccgcgucuggaacuccuuccagaucgaggaguucggcaccggcgucuucaccacccgcgucuacauggacgccgucuucgaguacaccaucgacugcgacggcuccauccucggcgccgccgucaacggcaagaaguccgcccacggcucccccaccuucuggaugggcucccacgaggucaacggcaccuggaugauccacacccucgaggcccucgacuacaaggagugcgaguggccccucacccacaccaucggcaccuccgucgaggaguccgagauguucaugccccgcuccaucggcggccccgucuccucccacaaccacauccccggcuacaagguccagaccaacggccccuggaugcaggucccccucgaggucaagcgcgaggccugccccggcaccuccgucaucaucgacggcaacugcgacggccgcggcaaguccacccgcuccaccaccgacuccggcaaggucauccccgaguggugcugccgcuccugcaccaugccccccgucuccuuccacggcuccgacggcugcugguaccccauggagauccgcccccgcaagacccacgagucccaccucguccgcuccugggucaccgccugaggacuagugcaucacauuuaaaagcaucucagccuaccaugagaauaagagaaagaaaaugaagaucaauagcuuauucaucucuuuuucuuuuucguugguguaaagccaacacccugucuaaaaaacauaaauuucuuuaaucauuuugccucuuuucucugugcuucaauuaauaaaaaauggaaagaaccuagaucuaaaaaaaaaaaaaaaaaaaaaaaaaaaaaaaaaaaaaaaaaaaaaaaaaaaaaaaaaaaaaaaaugcaucccccccccccccccccccccccccccccccaaaggcucuuuucagagccaccagaauu

SEQ ID NO: 2471 - RNA, 1645 nt, Artificial Sequence
  mRNA product Design i-2 comprising derived and/or modified sequence from YFV__NC_002031.1__eSS-NS1-Y (polyprotein: aa758-1177) (opt3)
ggggcgcugccuacggagguggcagccaucuccuucucggcaucaagcuuaccaugagcauguccaugauccuggugggcgucauuaugauguuccucucucuugggguuggagccgaccaggguugcgcuauaaacuuuggcaagagagagcugaaauguggggauggaaucuucauuuuuagggacucagaugacugguugaauaaguacaguuauuaccccgaagauccugugaaauuagcaagcaucguaaaggccuccuucgaggaaggcaaaugcggucugaacucuguggacucgcuagagcacgaaauguggcggucacgcgcggaugagauuaaugcuaucuuugaggaaaacgaggucgacauaagcgugguugugcaagauccaaagaaugucuaucagcgagggacccauccguucagucguaucagagacggacuccaguacggcuggaagacauggggcaaaaaccugguguuuucccccgggaggaagaauggaucuuucauuaucgaugguaaaagccggaaggaauguccuuuuuccaaccgcguauggaacucauuccagauugaggaguuuggcacugggguuuucacgaccagaguguauauggacgccgucuuugaauacacaaucgauugcgacggaaguauacuuggcgcagccgugaaugguaaaaagagcgcucacgggucuccaacuuucuggaugggaucccaugaggugaauggcaccuggaugauucacacacuggaagcauuggacuauaaggagugugaauggccccucacccauacuaucggcacaucagucgaggagagcgaaauguucaugccuaggaguauugggggaccaguuucuucccacaaccacauccccgguuacaaagugcaaaccaauggcccuuggaugcagguaccacuggaggugaagcgggaagccugcccggggacgagcgucaucauugauggaaacugugacggccgcgguaaaucgacucgaucuaccacagauuccgggaaggugauacccgaguggugcuguagaucaugcacuaugccuccaguuaguuuucauggcagcgacggauguugguaccccauggaaaucaggccucggaaaacccacgagucccaucuggugcguucuugggucacagcuggcgagauucacgccgugccauucgggcucguaagcaugaugaucgcgauggaaguuguguuacgcaagagacagggacccaaacagaugcuggucgguggcgugguccuuuugggggcaaugcuggugggacaaguuaccugaggacuagugcaucacauuuaaaagcaucucagccuaccaugagaauaagagaaagaaaaugaagaucaauagcuuauucaucucuuuuucuuuuucguugguguaaagccaacacccugucuaaaaaacauaaauuucuuuaaucauuuugccucuuuucucugugcuucaauuaauaaaaaauggaaagaaccuagaucuaaaaaaaaaaaaaaaaaaaaaaaaaaaaaaaaaaaaaaaaaaaaaaaaaaaaaaaaaaaaaaaaugcaucccccccccccccccccccccccccccccccaaaggcucuuuucagagccaccagaauu

SEQ ID NO: 2472 - RNA, 1504 nt, Artificial Sequence
  mRNA product Design i-2 comprising derived and/or modified sequence from YFV__NC_002031.1__eSS-NS1 (polyprotein: aa758-1130) (opt3)
ggggcgcugccuacggagguggcagccaucuccuucucggcaucaagcuuaccaugagcauguccaugauccuggugggcgucauuaugauguuccucucucuugggguuggagccgaccaggguugcgcuauaaacuuuggcaagagagagcugaaauguggggauggaaucuucauuuuuagggacucagaugacugguugaauaaguacaguuauuaccccgaagauccugugaaauuagcaagcaucguaaaggccuccuucgaggaaggcaaaugcggucugaacucuguggacucgcuagagcacgaaauguggcggucacgcgcggaugagauuaaugcuaucuuugaggaaaacgaggucgacauaagcgugguugugcaagauccaaagaaugucuaucagcgagggacccauccguucagucguaucagagacggacuccaguacggcuggaagacauggggcaaaaaccugguguuuucccccgggaggaagaauggaucuuucauuaucgaugguaaaagccggaaggaauguccuuuuuccaaccgcguauggaacucauuccagauugaggaguuuggcacugggguuuucacgaccagaguguauauggacgccgucuuugaauacacaaucgauugcgacggaaguauacuuggcgcagccgugaaugguaaaaagagcgcucacgggucuccaacuuucuggaugggaucccaugaggugaauggcaccuggaugauucacacacuggaagcauuggacuauaaggagugugaauggccccucacccauacuaucggcacaucagucgaggagagcgaaauguucaugccuaggaguauugggggaccaguuucuucccacaaccacauccccgguuacaaagugcaaaccaauggcccuuggaugcagguaccacuggaggugaagcgggaagccugcccggggacgagcgucaucauugauggaaacugugacggccgcgguaaaucgacucgaucuaccacagauuccgggaaggugauacccgaguggugcuguagaucaugcacuaugccuccaguuaguuuucauggcagcgacggauguugguaccccauggaaaucaggccucggaaaacccacgagucccaucuggugcguucuugggucacagcuugaggacuagugcaucacauuuaaaagcaucucagccuaccaugagaauaagagaaagaaaaugaagaucaauagcuuauucaucucuuuuucuuuuucguugguguaaagccaacacccugucuaaaaaacauaaauuucuuuaaucauuuugccucuuuucucugugcuucaauuaauaaaaaauggaaagaaccuagaucuaaaaaaaaaaaaaaaaaaaaaaaaaaaaaaaaaaaaaaaaaaaaaaaaaaaaaaaaaaaaaaaaugcaucccccccccccccccccccccccccccccccaaaggcucuuuucagagccaccagaauu

SEQ ID NO: 2473 - RNA, 1495 nt, Artificial Sequence
  mRNA product Design i-2 comprising derived and/or modified sequence from YFV__NC_002031.1__SSIgE-NS1 (polyprotein: aa779-1130) (opt3)
ggggcgcugccuacggagguggcagccaucuccuucucggcaucaagcuuaccauggacuggaccuggauccuguuccucguggccgcugcaacaagaguccacagcgaccaggguugcgcuauaaacuuuggcaagagagagcugaaauguggggauggaaucuucauuuuuagggacucagaugacugguugaauaaguacaguuauuaccccgaagauccugugaaauuagcaagcaucguaaaggccuccuucgaggaaggcaaaugcggucugaacucuguggacucgcuagagcacgaaauguggcggucacgcgcggaugagauuaaugcuaucuuugaggaaaacgaggucgacauaagcgugguugugcaagauccaaagaaugucuaucagcgagggacccauccguucagucguaucagagacggacuccaguacggcuggaagacauggggcaaaaaccugguguuuucccccgggaggaagaauggaucuuucauuaucgaugguaaaagccggaaggaauguccuuuuuccaaccgcguauggaacucauuccagauugaggaguuuggcacugggguuuucacgaccagaguguauauggacgccgucuuugaauacacaaucgauugcgacggaaguauacuuggcgcagccgugaaugguaaaaagagcgcucacgggucuccaacuuucuggaugggaucccaugaggugaauggcaccuggaugauucacacacuggaagcauuggacuauaaggagugugaauggccccucacccauacuaucggcacaucagucgaggagagcgaaauguucaugccuaggaguauugggggaccaguuucuucccacaaccacauccccgguuacaaagugcaaaccaauggcccuuggaugcagguaccacuggaggugaagcgggaagccugcccggggacgagcgucaucauugauggaaacugugacggccgcgguaaaucgacucgaucuaccacagauuccgggaaggugauacccgaguggugcuguagaucaugcacuaugccuccaguuaguuuucauggcagcgacggauguugguaccccauggaaaucaggccucggaaaacccacgagucccaucuggugcguucuugggucacagcuugaggacuagugcaucacauuuaaaagcaucucagccuaccaugagaauaagagaaagaaaaugaagaucaauagcuuauucaucucuuuuucuuuuucguugguguaaagccaacacccugucuaaaaaacauaaauuucuuuaaucauuuugccucuuuucucugugcuucaauuaauaaaaaauggaaagaaccuagaucuaaaaaaaaaaaaaaaaaaaaaaaaaaaaaaaaaaaaaaaaaaaaaaaaaaaaaaaaaaaaaaaaugcaucccccccccccccccccccccccccccccccaaaggcucuuuucagagccaccagaauu

SEQ ID NO: 2474 - RNA, 1645 nt, Artificial Sequence
  mRNA product Design i-2 comprising derived and/or modified sequence from YFV__NC_002031.1__eSS-NS1-Y (polyprotein: aa758-1177) (opt4)
ggggcgcugccuacggagguggcagccaucuccuucucggcaucaagcuuaccaugagcaugagcaugauccuggugggcgugaucaugauguuccugagccugggcgugggcgccgaccagggcugcgccaucaacuucggcaagagagagcugaagugcggcgacggcaucuucaucuucagagacagcgacgacuggcugaacaaguacagcuacuaccccgaggaccccgugaagcuggccagcaucgugaaggccagcuucgaggagggcaagugcggccugaacagcguggacagccuggagcacgagauguggagaagcagagccgacgagaucaacgccaucuucgaggagaacgagguggacaucagcgugguggugcaggaccccaagaacguguaccagagaggcacccaccccuucagcagaaucagagacggccugcaguacggcuggaagaccuggggcaagaaccugguguucagccccggcagaaagaacggcagcuucaucaucgacggcaagagcagaaaggagugccccuucagcaacagaguguggaacagcuuccagaucgaggaguucggcaccggcguguucaccaccagaguguacauggacgccguguucgaguacaccaucgacugcgacggcagcauccugggcgccgccgugaacggcaagaagagcgcccacggcagccccaccuucuggaugggcagccacgaggugaacggcaccuggaugauccacacccuggaggcccuggacuacaaggagugcgaguggccccugacccacaccaucggcaccagcguggaggagagcgagauguucaugcccagaagcaucggcggccccgugagcagccacaaccacauccccggcuacaaggugcagaccaacggccccuggaugcaggugccccuggaggugaagagagaggccugccccggcaccagcgugaucaucgacggcaacugcgacggcagaggcaagagcaccagaagcaccaccgacagcggcaaggugauccccgaguggugcugcagaagcugcaccaugccccccgugagcuuccacggcagcgacggcugcugguaccccauggagaucagacccagaaagacccacgagagccaccuggugagaagcugggugaccgccggcgagauccacgccgugcccuucggccuggugagcaugaugaucgccauggagguggugcugagaaagagacagggccccaagcagaugcuggugggcggcguggugcugcugggcgccaugcuggugggccaggugaccugaggacuagugcaucacauuuaaaagcaucucagccuaccaugagaauaagagaaagaaaaugaagaucaauagcuuauucaucucuuuuucuuuuucguugguguaaagccaacacccugucuaaaaaacauaaauuucuuuaaucauuuugccucuuuucucugugcuucaauuaauaaaaaauggaaagaaccuagaucuaaaaaaaaaaaaaaaaaaaaaaaaaaaaaaaaaaaaaaaaaaaaaaaaaaaaaaaaaaaaaaaaugcaucccccccccccccccccccccccccccccccaaaggcucuuuucagagccaccagaauu

SEQ ID NO: 2475 - RNA, 1504 nt, Artificial Sequence
  mRNA product Design i-2 comprising derived and/or modified sequence from YFV__NC_002031.1__eSS-NS1 (polyprotein: aa758-1130) (opt4)
ggggcgcugccuacggagguggcagccaucuccuucucggcaucaagcuuaccaugagcaugagcaugauccuggugggcgugaucaugauguuccugagccugggcgugggcgccgaccagggcugcgccaucaacuucggcaagagagagcugaagugcggcgacggcaucuucaucuucagagacagcgacgacuggcugaacaaguacagcuacuaccccgaggaccccgugaagcuggccagcaucgugaaggccagcuucgaggagggcaagugcggccugaacagcguggacagccuggagcacgagauguggagaagcagagccgacgagaucaacgccaucuucgaggagaacgagguggacaucagcgugguggugcaggaccccaagaacguguaccagagaggcacccaccccuucagcagaaucagagacggccugcaguacggcuggaagaccuggggcaagaaccugguguucagccccggcagaaagaacggcagcuucaucaucgacggcaagagcagaaaggagugccccuucagcaacagaguguggaacagcuuccagaucgaggaguucggcaccggcguguucaccaccagaguguacauggacgccguguucgaguacaccaucgacugcgacggcagcauccugggcgccgccgugaacggcaagaagagcgcccacggcagccccaccuucuggaugggcagccacgaggugaacggcaccuggaugauccacacccuggaggcccuggacuacaaggagugcgaguggccccugacccacaccaucggcaccagcguggaggagagcgagauguucaugcccagaagcaucggcggccccgugagcagccacaaccacauccccggcuacaaggugcagaccaacggccccuggaugcaggugccccuggaggugaagagagaggccugccccggcaccagcgugaucaucgacggcaacugcgacggcagaggcaagagcaccagaagcaccaccgacagcggcaaggugauccccgaguggugcugcagaagcugcaccaugccccccgugagcuuccacggcagcgacggcugcugguaccccauggagaucagacccagaaagacccacgagagccaccuggugagaagcugggugaccgccugaggacuagugcaucacauuuaaaagcaucucagccuaccaugagaauaagagaaagaaaaugaagaucaauagcuuauucaucucuuuuucuuuuucguugguguaaagccaacacccugucuaaaaaacauaaauuucuuuaaucauuuugccucuuuucucugugcuucaauuaauaaaaaauggaaagaaccuagaucuaaaaaaaaaaaaaaaaaaaaaaaaaaaaaaaaaaaaaaaaaaaaaaaaaaaaaaaaaaaaaaaaugcaucccccccccccccccccccccccccccccccaaaggcucuuuucagagccaccagaauu

SEQ ID NO: 2476 - RNA, 1495 nt, Artificial Sequence
  mRNA product Design i-2 comprising derived and/or modified sequence from YFV__NC_002031.1__SSIgE-NS1 (polyprotein: aa779-1130) (opt4)
ggggcgcugccuacggagguggcagccaucuccuucucggcaucaagcuuaccauggacuggaccuggauccuguuccugguggccgccgccaccagagugcacagcgaccagggcugcgccaucaacuucggcaagagagagcugaagugcggcgacggcaucuucaucuucagagacagcgacgacuggcugaacaaguacagcuacuaccccgaggaccccgugaagcuggccagcaucgugaaggccagcuucgaggagggcaagugcggccugaacagcguggacagccuggagcacgagauguggagaagcagagccgacgagaucaacgccaucuucgaggagaacgagguggacaucagcgugguggugcaggaccccaagaacguguaccagagaggcacccaccccuucagcagaaucagagacggccugcaguacggcuggaagaccuggggcaagaaccugguguucagccccggcagaaagaacggcagcuucaucaucgacggcaagagcagaaaggagugccccuucagcaacagaguguggaacagcuuccagaucgaggaguucggcaccggcguguucaccaccagaguguacauggacgccguguucgaguacaccaucgacugcgacggcagcauccugggcgccgccgugaacggcaagaagagcgcccacggcagccccaccuucuggaugggcagccacgaggugaacggcaccuggaugauccacacccuggaggcccuggacuacaaggagugcgaguggccccugacccacaccaucggcaccagcguggaggagagcgagauguucaugcccagaagcaucggcggccccgugagcagccacaaccacauccccggcuacaaggugcagaccaacggccccuggaugcaggugccccuggaggugaagagagaggccugccccggcaccagcgugaucaucgacggcaacugcgacggcagaggcaagagcaccagaagcaccaccgacagcggcaaggugauccccgaguggugcugcagaagcugcaccaugccccccgugagcuuccacggcagcgacggcugcugguaccccauggagaucagacccagaaagacccacgagagccaccuggugagaagcugggugaccgccugaggacuagugcaucacauuuaaaagcaucucagccuaccaugagaauaagagaaagaaaaugaagaucaauagcuuauucaucucuuuuucuuuuucguugguguaaagccaacacccugucuaaaaaacauaaauuucuuuaaucauuuugccucuuuucucugugcuucaauuaauaaaaaauggaaagaaccuagaucuaaaaaaaaaaaaaaaaaaaaaaaaaaaaaaaaaaaaaaaaaaaaaaaaaaaaaaaaaaaaaaaaugcaucccccccccccccccccccccccccccccccaaaggcucuuuucagagccaccagaauu

SEQ ID NO: 2477 - RNA, 1645 nt, Artificial Sequence
  mRNA product Design i-2 comprising derived and/or modified sequence from YFV__NC_002031.1__eSS-NS1-Y (polyprotein: aa758-1177) (opt5)
ggggcgcugccuacggagguggcagccaucuccuucucggcaucaagcuuaccaugagcauguccaugauccuggugggcgucauuaugauguuccucucucuggggguuggagccgaccagggcugcgcuaucaacuuugggaagagagagcuuaaauguggagauggcauuuucaucuuucgggacagcgaugacuggcugaauaaguacuccuauuaccccgaagauccugugaaacucgccucuauugugaaggcgagcuucgaggaagggaaaugcggacugaacuccgucgacucucuugagcacgaaauguggcgcagcagagcugaugagaucaaugccaucuuugaggaaaacgagguggacauuuccguugugguccaagauccgaagaauguguaucagcggggcacccaucccuucagccgcaucagagacggccugcaguacggguggaagacauggggcaaaaaccucguguuuucuccuggacggaagaauggguccuucauuaucgauggaaaaagccgcaaggaaugucccuuuucuaacagaguguggaacuccuuccagauugaggaguuuggcacgggggucuucaccacacggguguauauggacgccguguuugaauacaccaucgauugcgacggaagcauucugggcgcugccgucaauggcaaaaagucugcucacggguccccuacauucuggaugggaagccaugagguuaauggcaccuggaugauccacacacuggaagcccucgacuauaaggagugugaauggccccugacccauacgaucgggaccuccguggaggagucugaaauguucaugccucgcagcauuggaggcccgguguccagccacaaccacauccccggguacaaaguccaaacaaauggaccuuggaugcagguuccccuugagguuaagagagaagcgugcccuggcaccucugugauuaucgauggcaacugugacgggcggggaaaauccacacgcagcaccacggauucuggcaaggucauucccgaguggugcuguagaagcugcacaaugccgccuguguccuuucaugggucugacggauguugguaccccauggaaauccggccucgcaaaacccacgagagccaucugguuagauccugggugacagccggcgagauccacgcuguccccuucgggcucgugagcaugaugauugccauggaagucgugcugcggaagagacagggccccaaacagaugcuuguuggaggcgugguccugcucggggcuaugcuggugggacaaguuaccugaggacuagugcaucacauuuaaaagcaucucagccuaccaugagaauaagagaaagaaaaugaagaucaauagcuuauucaucucuuuuucuuuuucguugguguaaagccaacacccugucuaaaaaacauaaauuucuuuaaucauuuugccucuuuucucugugcuucaauuaauaaaaaauggaaagaaccuagaucuaaaaaaaaaaaaaaaaaaaaaaaaaaaaaaaaaaaaaaaaaaaaaaaaaaaaaaaaaaaaaaaaugcaucccccccccccccccccccccccccccccccaaaggcucuuuucagagccaccagaauu

SEQ ID NO: 2478 - RNA, 1504 nt, Artificial Sequence
  mRNA product Design i-2 comprising derived and/or modified sequence from YFV__NC_002031.1__eSS-NS1 (polyprotein: aa758-1130) (opt5)
ggggcgcugccuacggagguggcagccaucuccuucucggcaucaagcuuaccaugagcauguccaugauccuggugggcgucauuaugauguuccucucucuggggguuggagccgaccagggcugcgcuaucaacuuugggaagagagagcuuaaauguggagauggcauuuucaucuuucgggacagcgaugacuggcugaauaaguacuccuauuaccccgaagauccugugaaacucgccucuauugugaaggcgagcuucgaggaagggaaaugcggacugaacuccgucgacucucuugagcacgaaauguggcgcagcagagcugaugagaucaaugccaucuuugaggaaaacgagguggacauuuccguugugguccaagauccgaagaauguguaucagcggggcacccaucccuucagccgcaucagagacggccugcaguacggguggaagacauggggcaaaaaccucguguuuucuccuggacggaagaauggguccuucauuaucgauggaaaaagccgcaaggaaugucccuuuucuaacagaguguggaacuccuuccagauugaggaguuuggcacgggggucuucaccacacggguguauauggacgccguguuugaauacaccaucgauugcgacggaagcauucugggcgcugccgucaauggcaaaaagucugcucacggguccccuacauucuggaugggaagccaugagguuaauggcaccuggaugauccacacacuggaagcccucgacuauaaggagugugaauggccccugacccauacgaucgggaccuccguggaggagucugaaauguucaugccucgcagcauuggaggcccgguguccagccacaaccacauccccggguacaaaguccaaacaaauggaccuuggaugcagguuccccuugagguuaagagagaagcgugcccuggcaccucugugauuaucgauggcaacugugacgggcggggaaaauccacacgcagcaccacggauucuggcaaggucauucccgaguggugcuguagaagcugcacaaugccgccuguguccuuucaugggucugacggauguugguaccccauggaaauccggccucgcaaaacccacgagagccaucugguuagauccugggugacagccugaggacuagugcaucacauuuaaaagcaucucagccuaccaugagaauaagagaaagaaaaugaagaucaauagcuuauucaucucuuuuucuuuuucguugguguaaagccaacacccugucuaaaaaacauaaauuucuuuaaucauuuugccucuuuucucugugcuucaauuaauaaaaaauggaaagaaccuagaucuaaaaaaaaaaaaaaaaaaaaaaaaaaaaaaaaaaaaaaaaaaaaaaaaaaaaaaaaaaaaaaaaugcaucccccccccccccccccccccccccccccccaaaggcucuuuucagagccaccagaauu

SEQ ID NO: 2479 - RNA, 1495 nt, Artificial Sequence
  mRNA product Design i-2 comprising derived and/or modified sequence from YFV__NC_002031.1__SSIgE-NS1 (polyprotein: aa779-1130) (opt5)
ggggcgcugccuacggagguggcagccaucuccuucucggcaucaagcuuaccauggacuggaccuggauccuguuccucguggccgcugccacaagaguccacagcgaccagggcugcgcuaucaacuuugggaagagagagcuuaaauguggagauggcauuuucaucuuucgggacagcgaugacuggcugaauaaguacuccuauuaccccgaagauccugugaaacucgccucuauugugaaggcgagcuucgaggaagggaaaugcggacugaacuccgucgacucucuugagcacgaaauguggcgcagcagagcugaugagaucaaugccaucuuugaggaaaacgagguggacauuuccguugugguccaagauccgaagaauguguaucagcggggcacccaucccuucagccgcaucagagacggccugcaguacggguggaagacauggggcaaaaaccucguguuuucuccuggacggaagaauggguccuucauuaucgauggaaaaagccgcaaggaaugucccuuuucuaacagaguguggaacuccuuccagauugaggaguuuggcacgggggucuucaccacacggguguauauggacgccguguuugaauacaccaucgauugcgacggaagcauucugggcgcugccgucaauggcaaaaagucugcucacggguccccuacauucuggaugggaagccaugagguuaauggcaccuggaugauccacacacuggaagcccucgacuauaaggagugugaauggccccugacccauacgaucgggaccuccguggaggagucugaaauguucaugccucgcagcauuggaggcccgguguccagccacaaccacauccccggguacaaaguccaaacaaauggaccuuggaugcagguuccccuugagguuaagagagaagcgugcccuggcaccucugugauuaucgauggcaacugugacgggcggggaaaauccacacgcagcaccacggauucuggcaaggucauucccgaguggugcuguagaagcugcacaaugccgccuguguccuuucaugggucugacggauguugguaccccauggaaauccggccucgcaaaacccacgagagccaucugguuagauccugggugacagccugaggacuagugcaucacauuuaaaagcaucucagccuaccaugagaauaagagaaagaaaaugaagaucaauagcuuauucaucucuuuuucuuuuucguugguguaaagccaacacccugucuaaaaaacauaaauuucuuuaaucauuuugccucuuuucucugugcuucaauuaauaaaaaauggaaagaaccuagaucuaaaaaaaaaaaaaaaaaaaaaaaaaaaaaaaaaaaaaaaaaaaaaaaaaaaaaaaaaaaaaaaaugcaucccccccccccccccccccccccccccccccaaaggcucuuuucagagccaccagaauu

SEQ ID NO: 2480 - RNA, 1645 nt, Artificial Sequence
  mRNA product Design i-2 comprising derived and/or modified sequence from YFV__NC_002031.1__eSS-NS1-Y (polyprotein: aa758-1177) (opt6)
ggggcgcugccuacggagguggcagccaucuccuucucggcaucaagcuuaccaugucaaugaguaugauauuaguagggguaauaaugauguuccuuagcuuaggaguaggagcagaucaaggaugugcaauaaauuuuggaaaaagagaacuaaaaugcggagacgguauauuuauauuuagagauagugaugauuggcuaaauaaauauaguuacuauccagaagauccaguuaaauuagccucaauaguaaaagcuagcuuugaagaaggaaaauguggacuaaauucaguagacagucuagaacacgaaauguggagaucaagggcagaugaaauaaaugcaaucuuugaagaaaaugaaguggauauaucagugguaguacaagauccaaaaaauguguaccaaagaggaacacauccauuuaguaggauaagagauggauuacaauauggauggaaaacauggggaaaaaauuuaguauuuaguccaggaagaaaaaauggaucauuuauaauagaugggaaaagccgaaaagaauguccauuuucaaacagaguauggaacucauuucaaauugaagaauuuggaacaggaguauuuacaacaagaguauauauggaugcaguauuugaauacaccauagauugugauggaaguauauuaggagcagcaguaaaugggaaaaaaagcgcucacggaaguccaacguuuuggaugggaucacacgagguaaauggcacguggaugauacauacuuuagaagcauuagauuacaaagaaugugaauggccauuaacucauacaauagguacaagcguagaagaaagugagauguuuaugccacguucaaucggggggccaguaucaagucauaaccauauaccaggauauaaaguacaaacgaauggaccuuggaugcaaguaccacuagaaguaaaacgagaagcaugcccaggaacgucaguaauaauagauggaaauugugauggcagggguaaaagcacaagaucaacaacagauucaggaaaaguaauaccugaaugguguuguagaaguuguacaaugccaccaguaucauuccauggaagugauggaugcugguauccaauggaaauuagaccaagaaaaacucaugaaagucauuuaguaagaucuuggguaacugcaggagaaauacaugcaguaccauuugguuuaguaaguaugaugauagcaauggaaguaguucuaagaaaaaggcaagggccuaaacaaaugcuagugggaggaguaguauugcuaggugcaauguuaguaggccaaguaaccugaggacuagugcaucacauuuaaaagcaucucagccuaccaugagaauaagagaaagaaaaugaagaucaauagcuuauucaucucuuuuucuuuuucguugguguaaagccaacacccugucuaaaaaacauaaauuucuuuaaucauuuugccucuuuucucugugcuucaauuaauaaaaaauggaaagaaccuagaucuaaaaaaaaaaaaaaaaaaaaaaaaaaaaaaaaaaaaaaaaaaaaaaaaaaaaaaaaaaaaaaaaugcaucccccccccccccccccccccccccccccccaaaggcucuuuucagagccaccagaauu

SEQ ID NO: 2481 - RNA, 1504 nt, Artificial Sequence
  mRNA product Design i-2 comprising derived and/or modified sequence from YFV__NC_002031.1__eSS-NS1 (polyprotein: aa758-1130) (opt6)
ggggcgcugccuacggagguggcagccaucuccuucucggcaucaagcuuaccaugucaaugaguaugauauuaguagggguaauaaugauguuccuuagcuuaggaguaggagcagaucaaggaugugcaauaaauuuuggaaaaagagaacuaaaaugcggagacgguauauuuauauuuagagauagugaugauuggcuaaauaaauauaguuacuauccagaagauccaguuaaauuagccucaauaguaaaagcuagcuuugaagaaggaaaauguggacuaaauucaguagacagucuagaacacgaaauguggagaucaagggcagaugaaauaaaugcaaucuuugaagaaaaugaaguggauauaucagugguaguacaagauccaaaaaauguguaccaaagaggaacacauccauuuaguaggauaagagauggauuacaauauggauggaaaacauggggaaaaaauuuaguauuuaguccaggaagaaaaaauggaucauuuauaauagaugggaaaagccgaaaagaauguccauuuucaaacagaguauggaacucauuucaaauugaagaauuuggaacaggaguauuuacaacaagaguauauauggaugcaguauuugaauacaccauagauugugauggaaguauauuaggagcagcaguaaaugggaaaaaaagcgcucacggaaguccaacguuuuggaugggaucacacgagguaaauggcacguggaugauacauacuuuagaagcauuagauuacaaagaaugugaauggccauuaacucauacaauagguacaagcguagaagaaagugagauguuuaugccacguucaaucggggggccaguaucaagucauaaccauauaccaggauauaaaguacaaacgaauggaccuuggaugcaaguaccacuagaaguaaaacgagaagcaugcccaggaacgucaguaauaauagauggaaauugugauggcagggguaaaagcacaagaucaacaacagauucaggaaaaguaauaccugaaugguguuguagaaguuguacaaugccaccaguaucauuccauggaagugauggaugcugguauccaauggaaauuagaccaagaaaaacucaugaaagucauuuaguaagaucuuggguaacugcaugaggacuagugcaucacauuuaaaagcaucucagccuaccaugagaauaagagaaagaaaaugaagaucaauagcuuauucaucucuuuuucuuuuucguugguguaaagccaacacccugucuaaaaaacauaaauuucuuuaaucauuuugccucuuuucucugugcuucaauuaauaaaaaauggaaagaaccuagaucuaaaaaaaaaaaaaaaaaaaaaaaaaaaaaaaaaaaaaaaaaaaaaaaaaaaaaaaaaaaaaaaaugcaucccccccccccccccccccccccccccccccaaaggcucuuuucagagccaccagaauu

SEQ ID NO: 2482 - RNA, 1495 nt, Artificial Sequence
  mRNA product Design i-2 comprising derived and/or modified sequence from YFV__NC_002031.1__SSIgE-NS1 (polyprotein: aa779-1130) (opt6)
ggggcgcugccuacggagguggcagccaucuccuucucggcaucaagcuuaccauggacuggacauggauauuauuuuuaguagcagcagcaacaagaguacauucagaucaaggaugugcaauaaauuuuggaaaaagagaacuaaaaugcggagacgguauauuuauauuuagagauagugaugauuggcuaaauaaauauaguuacuauccagaagauccaguuaaauuagccucaauaguaaaagcuagcuuugaagaaggaaaauguggacuaaauucaguagacagucuagaacacgaaauguggagaucaagggcagaugaaauaaaugcaaucuuugaagaaaaugaaguggauauaucagugguaguacaagauccaaaaaauguguaccaaagaggaacacauccauuuaguaggauaagagauggauuacaauauggauggaaaacauggggaaaaaauuuaguauuuaguccaggaagaaaaaauggaucauuuauaauagaugggaaaagccgaaaagaauguccauuuucaaacagaguauggaacucauuucaaauugaagaauuuggaacaggaguauuuacaacaagaguauauauggaugcaguauuugaauacaccauagauugugauggaaguauauuaggagcagcaguaaaugggaaaaaaagcgcucacggaaguccaacguuuuggaugggaucacacgagguaaauggcacguggaugauacauacuuuagaagcauuagauuacaaagaaugugaauggccauuaacucauacaauagguacaagcguagaagaaagugagauguuuaugccacguucaaucggggggccaguaucaagucauaaccauauaccaggauauaaaguacaaacgaauggaccuuggaugcaaguaccacuagaaguaaaacgagaagcaugcccaggaacgucaguaauaauagauggaaauugugauggcagggguaaaagcacaagaucaacaacagauucaggaaaaguaauaccugaaugguguuguagaaguuguacaaugccaccaguaucauuccauggaagugauggaugcugguauccaauggaaauuagaccaagaaaaacucaugaaagucauuuaguaagaucuuggguaacugcaugaggacuagugcaucacauuuaaaagcaucucagccuaccaugagaauaagagaaagaaaaugaagaucaauagcuuauucaucucuuuuucuuuuucguugguguaaagccaacacccugucuaaaaaacauaaauuucuuuaaucauuuugccucuuuucucugugcuucaauuaauaaaaaauggaaagaaccuagaucuaaaaaaaaaaaaaaaaaaaaaaaaaaaaaaaaaaaaaaaaaaaaaaaaaaaaaaaaaaaaaaaaugcaucccccccccccccccccccccccccccccccaaaggcucuuuucagagccaccagaauu

SEQ ID NO: 2483 - RNA, 1645 nt, Artificial Sequence
  mRNA product Design i-2 comprising derived and/or modified sequence from YFV__NC_002031.1__eSS-NS1-Y (polyprotein: aa758-1177) (opt11)
ggggcgcugccuacggagguggcagccaucuccuucucggcaucaagcuuaccaugagcaugagcaugaucuugguaggggucauaaugauguucuugagccuagggguaggcgcagaccagggaugcgcgauaaacuucggcaaacgcgaacucaaaugcggggacggaaucuucaucuuucgcgacagugacgacuggcuaaacaaguacaguuacuacccggaagaccccguaaaacuagccucaauaguaaaagcgagcuucgaagaaggaaagugcgggcuaaacagcguggacucccuagagcacgagauguggaggucgagagcggacgagaucaacgccauauucgaagaaaaugaaguagacauaagcguagucguacaagaucccaaaaacguguaccagcgcggaacccaccccuucagcaggaucagagacgggcuacaauacggauggaagacauggggcaaaaaccuggucuucagcccgggcaggaaaaacggaucguucaucaucgauggcaaaagccgaaaggagugcccguucucaaacaggguauggaacucguuccagaucgaagaguucggcacaggcgucuucacgacaagagucuacauggacgcaguguucgaauacacaaucgacugcgacggcuccauacugggcgcagccgugaacgggaaaaagagcgcacacggaagcccgaccuuuuggauggguucgcacgaggugaacggaacauggaugauacacaccuuagaagcacucgauuacaaagaaugcgaauggcccuuaacccacaccaucgguacguccguagaagaaagcgaaauguucaugccgcgcucaaucggcggcccagucucgagccacaaccacaucccgggcuauaaaguacaaacaaacgggccauggaugcagguaccccucgaggucaagcgcgaagccugccccggaaccucggucaucaucgacggcaacugcgacggcaggggaaaaagcacgcgcucaaccacggacucgggaaagguaauaccagaguggugcugcaggagcugcaccaugccaccgguaucguuccacggcucagacggaugcugguacccgauggaaaucagacccagaaaaacgcacgagagccaccucguacgcucauggguaaccgcaggcgagauccacgccgugccauuuggacuggucucaaugaugauagcgauggaggucgugcucaggaagaggcaagggcccaagcaaaugcucguaggaggaguaguacuccugggcgcaaugcuggucggacaggugaccugaggacuagugcaucacauuuaaaagcaucucagccuaccaugagaauaagagaaagaaaaugaagaucaauagcuuauucaucucuuuuucuuuuucguugguguaaagccaacacccugucuaaaaaacauaaauuucuuuaaucauuuugccucuuuucucugugcuucaauuaauaaaaaauggaaagaaccuagaucuaaaaaaaaaaaaaaaaaaaaaaaaaaaaaaaaaaaaaaaaaaaaaaaaaaaaaaaaaaaaaaaaugcaucccccccccccccccccccccccccccccccaaaggcucuuuucagagccaccagaauu

SEQ ID NO: 2484 - RNA, 1504 nt, Artificial Sequence
  mRNA product Design i-2 comprising derived and/or modified sequence from YFV__NC_002031.1__eSS-NS1 (polyprotein: aa758-1130) (opt11)
ggggcgcugccuacggagguggcagccaucuccuucucggcaucaagcuuaccaugagcaugagcaugaucuugguaggggucauaaugauguucuugagccuagggguaggcgcagaccagggaugcgcgauaaacuucggcaaacgcgaacucaaaugcggggacggaaucuucaucuuucgcgacagugacgacuggcuaaacaaguacaguuacuacccggaagaccccguaaaacuagccucaauaguaaaagcgagcuucgaagaaggaaagugcgggcuaaacagcguggacucccuagagcacgagauguggaggucgagagcggacgagaucaacgccauauucgaagaaaaugaaguagacauaagcguagucguacaagaucccaaaaacguguaccagcgcggaacccaccccuucagcaggaucagagacgggcuacaauacggauggaagacauggggcaaaaaccuggucuucagcccgggcaggaaaaacggaucguucaucaucgauggcaaaagccgaaaggagugcccguucucaaacaggguauggaacucguuccagaucgaagaguucggcacaggcgucuucacgacaagagucuacauggacgcaguguucgaauacacaaucgacugcgacggcuccauacugggcgcagccgugaacgggaaaaagagcgcacacggaagcccgaccuuuuggauggguucgcacgaggugaacggaacauggaugauacacaccuuagaagcacucgauuacaaagaaugcgaauggcccuuaacccacaccaucgguacguccguagaagaaagcgaaauguucaugccgcgcucaaucggcggcccagucucgagccacaaccacaucccgggcuauaaaguacaaacaaacgggccauggaugcagguaccccucgaggucaagcgcgaagccugccccggaaccucggucaucaucgacggcaacugcgacggcaggggaaaaagcacgcgcucaaccacggacucgggaaagguaauaccagaguggugcugcaggagcugcaccaugccaccgguaucguuccacggcucagacggaugcugguacccgauggaaaucagacccagaaaaacgcacgagagccaccucguacgcucauggguaaccgcaugaggacuagugcaucacauuuaaaagcaucucagccuaccaugagaauaagagaaagaaaaugaagaucaauagcuuauucaucucuuuuucuuuuucguugguguaaagccaacacccugucuaaaaaacauaaauuucuuuaaucauuuugccucuuuucucugugcuucaauuaauaaaaaauggaaagaaccuagaucuaaaaaaaaaaaaaaaaaaaaaaaaaaaaaaaaaaaaaaaaaaaaaaaaaaaaaaaaaaaaaaaaugcaucccccccccccccccccccccccccccccccaaaggcucuuuucagagccaccagaauu

SEQ ID NO: 2485 - RNA, 1495 nt, Artificial Sequence
  mRNA product Design i-2 comprising derived and/or modified sequence from YFV__NC_002031.1__SSIgE-NS1 (polyprotein: aa779-1130) (opt11)
ggggcgcugccuacggagguggcagccaucuccuucucggcaucaagcuuaccauggauuggacguggauacucuuucucguggccgcggccacgcgcgugcacucggaccagggaugcgcgauaaacuucggcaaacgcgaacucaaaugcggggacggaaucuucaucuuucgcgacagugacgacuggcuaaacaaguacaguuacuacccggaagaccccguaaaacuagccucaauaguaaaagcgagcuucgaagaaggaaagugcgggcuaaacagcguggacucccuagagcacgagauguggaggucgagagcggacgagaucaacgccauauucgaagaaaaugaaguagacauaagcguagucguacaagaucccaaaaacguguaccagcgcggaacccaccccuucagcaggaucagagacgggcuacaauacggauggaagacauggggcaaaaaccuggucuucagcccgggcaggaaaaacggaucguucaucaucgauggcaaaagccgaaaggagugcccguucucaaacaggguauggaacucguuccagaucgaagaguucggcacaggcgucuucacgacaagagucuacauggacgcaguguucgaauacacaaucgacugcgacggcuccauacugggcgcagccgugaacgggaaaaagagcgcacacggaagcccgaccuuuuggauggguucgcacgaggugaacggaacauggaugauacacaccuuagaagcacucgauuacaaagaaugcgaauggcccuuaacccacaccaucgguacguccguagaagaaagcgaaauguucaugccgcgcucaaucggcggcccagucucgagccacaaccacaucccgggcuauaaaguacaaacaaacgggccauggaugcagguaccccucgaggucaagcgcgaagccugccccggaaccucggucaucaucgacggcaacugcgacggcaggggaaaaagcacgcgcucaaccacggacucgggaaagguaauaccagaguggugcugcaggagcugcaccaugccaccgguaucguuccacggcucagacggaugcugguacccgauggaaaucagacccagaaaaacgcacgagagccaccucguacgcucauggguaaccgcaugaggacuagugcaucacauuuaaaagcaucucagccuaccaugagaauaagagaaagaaaaugaagaucaauagcuuauucaucucuuuuucuuuuucguugguguaaagccaacacccugucuaaaaaacauaaauuucuuuaaucauuuugccucuuuucucugugcuucaauuaauaaaaaauggaaagaaccuagaucuaaaaaaaaaaaaaaaaaaaaaaaaaaaaaaaaaaaaaaaaaaaaaaaaaaaaaaaaaaaaaaaaugcaucccccccccccccccccccccccccccccccaaaggcucuuuucagagccaccagaauu

SEQ ID NO: 2486 - RNA, 1649 nt, Artificial Sequence
  mRNA product Design i-2 comprising derived and/or modified sequence from YFV__NC_002031.1__eSS-NS1-Y (polyprotein: aa758-1177) (wt)
gggagaggcgcugccuacggagguggcagccaucuccuucucggcaucaagcuuaccauguccaugagcaugaucuugguaggagugaucaugauguuuuugucucuaggaguuggggcggaucaaggaugcgccaucaacuuuggcaagagagagcucaagugcggagaugguaucuucauauuuagagacucugaugacuggcugaacaaguacucauacuauccagaagauccugugaagcuugcaucaauagugaaagccucuuuugaagaagggaaguguggccuaaauucaguugacucccuugagcaugagauguggagaagcagggcagaugagaucaaugccauuuuugaggaaaacgagguggacauuucuguugucgugcaggauccaaagaauguuuaccagagaggaacucauccauuuuccagaauucgggauggucugcaguaugguuggaagacuugggguaagaaccuuguguucuccccagggaggaagaauggaagcuucaucauagauggaaaguccaggaaagaaugcccguuuucaaaccgggucuggaauucuuuccagauagaggaguuugggacgggaguguucaccacacgcguguacauggacgcagucuuugaauacaccauagacugcgauggaucuaucuugggugcagcggugaacggaaaaaagagugcccauggcucuccaacauuuuggaugggaagucaugaaguaaaugggacauggaugauccacaccuuggaggcauuagauuacaaggagugugaguggccacugacacauacgauuggaacaucaguugaagagagugaaauguucaugccgagaucaaucggaggcccaguuagcucucacaaucauaucccuggauacaagguucagacgaacggaccuuggaugcagguaccacuagaagugaagagagaagcuugcccagggacuagcgugaucauugauggcaacugugauggacggggaaaaucaaccagauccaccacggauagcgggaaaguuauuccugaaugguguugccgcuccugcacaaugccgccugugagcuuccaugguagugauggguguugguaucccauggaaauuaggccaaggaaaacgcaugaaagccaucuggugcgcuccuggguuacagcuggagaaauacaugcugucccuuuugguuuggugagcaugaugauagcaauggaagugguccuaaggaaaagacagggaccaaagcaaauguugguuggaggaguagugcucuugggagcaaugcuggucgggcaaguaacuugaggacuagugcaucacauuuaaaagcaucucagccuaccaugagaauaagagaaagaaaaugaagaucaauagcuuauucaucucuuuuucuuuuucguugguguaaagccaacacccugucuaaaaaacauaaauuucuuuaaucauuuugccucuuuucucugugcuucaauuaauaaaaaauggaaagaaccuagaucuaaaaaaaaaaaaaaaaaaaaaaaaaaaaaaaaaaaaaaaaaaaaaaaaaaaaaaaaaaaaaaaaugcaucccccccccccccccccccccccccccccccaaaggcucuuuucagagccaccagaauu

SEQ ID NO: 2487 - RNA, 1508 nt, Artificial Sequence
  mRNA product Design i-2 comprising derived and/or modified sequence from YFV__NC_002031.1__eSS-NS1 (polyprotein: aa758-1130) (wt)
gggagaggcgcugccuacggagguggcagccaucuccuucucggcaucaagcuuaccauguccaugagcaugaucuugguaggagugaucaugauguuuuugucucuaggaguuggggcggaucaaggaugcgccaucaacuuuggcaagagagagcucaagugcggagaugguaucuucauauuuagagacucugaugacuggcugaacaaguacucauacuauccagaagauccugugaagcuugcaucaauagugaaagccucuuuugaagaagggaaguguggccuaaauucaguugacucccuugagcaugagauguggagaagcagggcagaugagaucaaugccauuuuugaggaaaacgagguggacauuucuguugucgugcaggauccaaagaauguuuaccagagaggaacucauccauuuuccagaauucgggauggucugcaguaugguuggaagacuugggguaagaaccuuguguucuccccagggaggaagaauggaagcuucaucauagauggaaaguccaggaaagaaugcccguuuucaaaccgggucuggaauucuuuccagauagaggaguuugggacgggaguguucaccacacgcguguacauggacgcagucuuugaauacaccauagacugcgauggaucuaucuugggugcagcggugaacggaaaaaagagugcccauggcucuccaacauuuuggaugggaagucaugaaguaaaugggacauggaugauccacaccuuggaggcauuagauuacaaggagugugaguggccacugacacauacgauuggaacaucaguugaagagagugaaauguucaugccgagaucaaucggaggcccaguuagcucucacaaucauaucccuggauacaagguucagacgaacggaccuuggaugcagguaccacuagaagugaagagagaagcuugcccagggacuagcgugaucauugauggcaacugugauggacggggaaaaucaaccagauccaccacggauagcgggaaaguuauuccugaaugguguugccgcuccugcacaaugccgccugugagcuuccaugguagugauggguguugguaucccauggaaauuaggccaaggaaaacgcaugaaagccaucuggugcgcuccuggguuacagcuugaggacuagugcaucacauuuaaaagcaucucagccuaccaugagaauaagagaaagaaaaugaagaucaauagcuuauucaucucuuuuucuuuuucguugguguaaagccaacacccugucuaaaaaacauaaauuucuuuaaucauuuugccucuuuucucugugcuucaauuaauaaaaaauggaaagaaccuagaucuaaaaaaaaaaaaaaaaaaaaaaaaaaaaaaaaaaaaaaaaaaaaaaaaaaaaaaaaaaaaaaaaugcaucccccccccccccccccccccccccccccccaaaggcucuuuucagagccaccagaauu

SEQ ID NO: 2488 - RNA, 1499 nt, Artificial Sequence
  mRNA product Design i-2 comprising derived and/or modified sequence from YFV__NC_002031.1__SSIgE-NS1 (polyprotein: aa779-1130) (wt)
gggagaggcgcugccuacggagguggcagccaucuccuucucggcaucaagcuuaccauggacuggaccuggauccuguuccucguggccgccgcgacccgcguccacagcgaucaaggaugcgccaucaacuuuggcaagagagagcucaagugcggagaugguaucuucauauuuagagacucugaugacuggcugaacaaguacucauacuauccagaagauccugugaagcuugcaucaauagugaaagccucuuuugaagaagggaaguguggccuaaauucaguugacucccuugagcaugagauguggagaagcagggcagaugagaucaaugccauuuuugaggaaaacgagguggacauuucuguugucgugcaggauccaaagaauguuuaccagagaggaacucauccauuuuccagaauucgggauggucugcaguaugguuggaagacuugggguaagaaccuuguguucuccccagggaggaagaauggaagcuucaucauagauggaaaguccaggaaagaaugcccguuuucaaaccgggucuggaauucuuuccagauagaggaguuugggacgggaguguucaccacacgcguguacauggacgcagucuuugaauacaccauagacugcgauggaucuaucuugggugcagcggugaacggaaaaaagagugcccauggcucuccaacauuuuggaugggaagucaugaaguaaaugggacauggaugauccacaccuuggaggcauuagauuacaaggagugugaguggccacugacacauacgauuggaacaucaguugaagagagugaaauguucaugccgagaucaaucggaggcccaguuagcucucacaaucauaucccuggauacaagguucagacgaacggaccuuggaugcagguaccacuagaagugaagagagaagcuugcccagggacuagcgugaucauugauggcaacugugauggacggggaaaaucaaccagauccaccacggauagcgggaaaguuauuccugaaugguguugccgcuccugcacaaugccgccugugagcuuccaugguagugauggguguugguaucccauggaaauuaggccaaggaaaacgcaugaaagccaucuggugcgcuccuggguuacagcuugaggacuagugcaucacauuuaaaagcaucucagccuaccaugagaauaagagaaagaaaaugaagaucaauagcuuauucaucucuuuuucuuuuucguugguguaaagccaacacccugucuaaaaaacauaaauuucuuuaaucauuuugccucuuuucucugugcuucaauuaauaaaaaauggaaagaaccuagaucuaaaaaaaaaaaaaaaaaaaaaaaaaaaaaaaaaaaaaaaaaaaaaaaaaaaaaaaaaaaaaaaaugcaucccccccccccccccccccccccccccccccaaaggcucuuuucagagccaccagaauu

SEQ ID NO: 2489 - RNA, 1649 nt, Artificial Sequence
  mRNA product Design i-2 comprising derived and/or modified sequence from YFV__NC_002031.1__eSS-NS1-Y (polyprotein: aa758-1177) (opt1)
gggagaggcgcugccuacggagguggcagccaucuccuucucggcaucaagcuuaccaugagcauguccaugauccuggugggcgucaucaugauguuccucagccugggggugggcgccgaccaggggugcgccaucaacuucggcaagcgcgagcugaagugcggggacggcaucuucaucuuccgggacuccgacgacuggcucaacaaguacagcuacuaccccgaggacccggugaagcuggcguccaucgucaaggccagcuucgaggagggcaagugcgggcugaacuccguggacagccucgagcacgagauguggcgcucccgggccgacgagaucaacgccaucuucgaggagaacgagguggacaucagcgucguggugcaggaccccaagaacgucuaccagcgcggcacccaccccuucucccggauccgcgacgggcugcaguacggcuggaagaccugggggaagaaccugguguucagccccggccggaagaacggcuccuucaucaucgacggcaagagccgcaaggagugcccguucuccaaccggguguggaacagcuuccagaucgaggaguucgggacgggggucuucaccacccgcguguacauggacgccguguucgaguacaccaucgacugcgacggcuccauccucggcgcggccgucaacgggaagaaguccgcccacggcagccccacguucuggauggggagccacgaggugaacggcaccuggaugauccacacccuggaggcccuggacuacaaggagugcgaguggccccucacccacacgaucgggaccagcguggaggaguccgagauguucaugccccggagcaucggcggcccggucuccagccacaaccacauccccggguacaaggugcagaccaacggccccuggaugcaggucccccuggaggugaagcgcgaggcgugcccggggaccuccgugaucaucgacggcaacugcgacgggcggggcaagagcacgcgcuccaccaccgacagcggcaaggugauccccgaguggugcugccgguccugcaccaugccgcccgucagcuuccacggguccgacggcugcugguaccccauggagauccgcccccggaagacgcacgagagccaccuggugcgcuccugggucaccgccggggagauccacgccgugcccuucggccucgugagcaugaugaucgccauggaggucgugcugcggaagcgccaggggcccaagcagaugcuggugggcggcgucgugcuccugggggccaugcuggugggccaggucaccugaggacuagugcaucacauuuaaaagcaucucagccuaccaugagaauaagagaaagaaaaugaagaucaauagcuuauucaucucuuuuucuuuuucguugguguaaagccaacacccugucuaaaaaacauaaauuucuuuaaucauuuugccucuuuucucugugcuucaauuaauaaaaaauggaaagaaccuagaucuaaaaaaaaaaaaaaaaaaaaaaaaaaaaaaaaaaaaaaaaaaaaaaaaaaaaaaaaaaaaaaaaugcaucccccccccccccccccccccccccccccccaaaggcucuuuucagagccaccagaauu

SEQ ID NO: 2490 - RNA, 1508 nt, Artificial Sequence
  mRNA product Design i-2 comprising derived and/or modified sequence from YFV__NC_002031.1__eSS-NS1 (polyprotein: aa758-1130) (opt1)
gggagaggcgcugccuacggagguggcagccaucuccuucucggcaucaagcuuaccaugagcauguccaugauccuggugggcgucaucaugauguuccucagccugggggugggcgccgaccaggggugcgccaucaacuucggcaagcgcgagcugaagugcggggacggcaucuucaucuuccgggacuccgacgacuggcucaacaaguacagcuacuaccccgaggacccggugaagcuggcguccaucgucaaggccagcuucgaggagggcaagugcgggcugaacuccguggacagccucgagcacgagauguggcgcucccgggccgacgagaucaacgccaucuucgaggagaacgagguggacaucagcgucguggugcaggaccccaagaacgucuaccagcgcggcacccaccccuucucccggauccgcgacgggcugcaguacggcuggaagaccugggggaagaaccugguguucagccccggccggaagaacggcuccuucaucaucgacggcaagagccgcaaggagugcccguucuccaaccggguguggaacagcuuccagaucgaggaguucgggacgggggucuucaccacccgcguguacauggacgccguguucgaguacaccaucgacugcgacggcuccauccucggcgcggccgucaacgggaagaaguccgcccacggcagccccacguucuggauggggagccacgaggugaacggcaccuggaugauccacacccuggaggcccuggacuacaaggagugcgaguggccccucacccacacgaucgggaccagcguggaggaguccgagauguucaugccccggagcaucggcggcccggucuccagccacaaccacauccccggguacaaggugcagaccaacggccccuggaugcaggucccccuggaggugaagcgcgaggcgugcccggggaccuccgugaucaucgacggcaacugcgacgggcggggcaagagcacgcgcuccaccaccgacagcggcaaggugauccccgaguggugcugccgguccugcaccaugccgcccgucagcuuccacggguccgacggcugcugguaccccauggagauccgcccccggaagacgcacgagagccaccuggugcgcuccugggucaccgccugaggacuagugcaucacauuuaaaagcaucucagccuaccaugagaauaagagaaagaaaaugaagaucaauagcuuauucaucucuuuuucuuuuucguugguguaaagccaacacccugucuaaaaaacauaaauuucuuuaaucauuuugccucuuuucucugugcuucaauuaauaaaaaauggaaagaaccuagaucuaaaaaaaaaaaaaaaaaaaaaaaaaaaaaaaaaaaaaaaaaaaaaaaaaaaaaaaaaaaaaaaaugcaucccccccccccccccccccccccccccccccaaaggcucuuuucagagccaccagaauu

SEQ ID NO: 2491 - RNA, 1499 nt, Artificial Sequence
  mRNA product Design i-2 comprising derived and/or modified sequence from YFV__NC_002031.1__SSIgE-NS1 (polyprotein: aa779-1130) (opt1)
gggagaggcgcugccuacggagguggcagccaucuccuucucggcaucaagcuuaccauggacuggaccuggauccuguuccucguggccgccgcgacccgcguccacagcgaccaggggugcgccaucaacuucggcaagcgcgagcugaagugcggggacggcaucuucaucuuccgggacuccgacgacuggcucaacaaguacagcuacuaccccgaggacccggugaagcuggcguccaucgucaaggccagcuucgaggagggcaagugcgggcugaacuccguggacagccucgagcacgagauguggcgcucccgggccgacgagaucaacgccaucuucgaggagaacgagguggacaucagcgucguggugcaggaccccaagaacgucuaccagcgcggcacccaccccuucucccggauccgcgacgggcugcaguacggcuggaagaccugggggaagaaccugguguucagccccggccggaagaacggcuccuucaucaucgacggcaagagccgcaaggagugcccguucuccaaccggguguggaacagcuuccagaucgaggaguucgggacgggggucuucaccacccgcguguacauggacgccguguucgaguacaccaucgacugcgacggcuccauccucggcgcggccgucaacgggaagaaguccgcccacggcagccccacguucuggauggggagccacgaggugaacggcaccuggaugauccacacccuggaggcccuggacuacaaggagugcgaguggccccucacccacacgaucgggaccagcguggaggaguccgagauguucaugccccggagcaucggcggcccggucuccagccacaaccacauccccggguacaaggugcagaccaacggccccuggaugcaggucccccuggaggugaagcgcgaggcgugcccggggaccuccgugaucaucgacggcaacugcgacgggcggggcaagagcacgcgcuccaccaccgacagcggcaaggugauccccgaguggugcugccgguccugcaccaugccgcccgucagcuuccacggguccgacggcugcugguaccccauggagauccgcccccggaagacgcacgagagccaccuggugcgcuccugggucaccgccugaggacuagugcaucacauuuaaaagcaucucagccuaccaugagaauaagagaaagaaaaugaagaucaauagcuuauucaucucuuuuucuuuuucguugguguaaagccaacacccugucuaaaaaacauaaauuucuuuaaucauuuugccucuuuucucugugcuucaauuaauaaaaaauggaaagaaccuagaucuaaaaaaaaaaaaaaaaaaaaaaaaaaaaaaaaaaaaaaaaaaaaaaaaaaaaaaaaaaaaaaaaugcaucccccccccccccccccccccccccccccccaaaggcucuuuucagagccaccagaauu

SEQ ID NO: 2492 - RNA, 1649 nt, Artificial Sequence
  mRNA product Design i-2 comprising derived and/or modified sequence from YFV__NC_002031.1__eSS-NS1-Y (polyprotein: aa758-1177) (opt2)
gggagaggcgcugccuacggagguggcagccaucuccuucucggcaucaagcuuaccauguccauguccaugauccucgucggcgucaucaugauguuccucucccucggcgucggcgccgaccagggcugcgccaucaacuucggcaagcgcgagcucaagugcggcgacggcaucuucaucuuccgcgacuccgacgacuggcucaacaaguacuccuacuaccccgaggaccccgucaagcucgccuccaucgucaaggccuccuucgaggagggcaagugcggccucaacuccgucgacucccucgagcacgagauguggcgcucccgcgccgacgagaucaacgccaucuucgaggagaacgaggucgacaucuccgucgucguccaggaccccaagaacgucuaccagcgcggcacccaccccuucucccgcauccgcgacggccuccaguacggcuggaagaccuggggcaagaaccucgucuucucccccggccgcaagaacggcuccuucaucaucgacggcaagucccgcaaggagugccccuucuccaaccgcgucuggaacuccuuccagaucgaggaguucggcaccggcgucuucaccacccgcgucuacauggacgccgucuucgaguacaccaucgacugcgacggcuccauccucggcgccgccgucaacggcaagaaguccgcccacggcucccccaccuucuggaugggcucccacgaggucaacggcaccuggaugauccacacccucgaggcccucgacuacaaggagugcgaguggccccucacccacaccaucggcaccuccgucgaggaguccgagauguucaugccccgcuccaucggcggccccgucuccucccacaaccacauccccggcuacaagguccagaccaacggccccuggaugcaggucccccucgaggucaagcgcgaggccugccccggcaccuccgucaucaucgacggcaacugcgacggccgcggcaaguccacccgcuccaccaccgacuccggcaaggucauccccgaguggugcugccgcuccugcaccaugccccccgucuccuuccacggcuccgacggcugcugguaccccauggagauccgcccccgcaagacccacgagucccaccucguccgcuccugggucaccgccggcgagauccacgccguccccuucggccucgucuccaugaugaucgccauggaggucguccuccgcaagcgccagggccccaagcagaugcucgucggcggcgucguccuccucggcgccaugcucgucggccaggucaccugaggacuagugcaucacauuuaaaagcaucucagccuaccaugagaauaagagaaagaaaaugaagaucaauagcuuauucaucucuuuuucuuuuucguugguguaaagccaacacccugucuaaaaaacauaaauuucuuuaaucauuuugccucuuuucucugugcuucaauuaauaaaaaauggaaagaaccuagaucuaaaaaaaaaaaaaaaaaaaaaaaaaaaaaaaaaaaaaaaaaaaaaaaaaaaaaaaaaaaaaaaaugcaucccccccccccccccccccccccccccccccaaaggcucuuuucagagccaccagaauu

SEQ ID NO: 2493 - RNA, 1508 nt, Artificial Sequence
  mRNA product Design i-2 comprising derived and/or modified sequence from YFV__NC_002031.1__eSS-NS1 (polyprotein: aa758-1130) (opt2)
gggagaggcgcugccuacggagguggcagccaucuccuucucggcaucaagcuuaccauguccauguccaugauccucgucggcgucaucaugauguuccucucccucggcgucggcgccgaccagggcugcgccaucaacuucggcaagcgcgagcucaagugcggcgacggcaucuucaucuuccgcgacuccgacgacuggcucaacaaguacuccuacuaccccgaggaccccgucaagcucgccuccaucgucaaggccuccuucgaggagggcaagugcggccucaacuccgucgacucccucgagcacgagauguggcgcucccgcgccgacgagaucaacgccaucuucgaggagaacgaggucgacaucuccgucgucguccaggaccccaagaacgucuaccagcgcggcacccaccccuucucccgcauccgcgacggccuccaguacggcuggaagaccuggggcaagaaccucgucuucucccccggccgcaagaacggcuccuucaucaucgacggcaagucccgcaaggagugccccuucuccaaccgcgucuggaacuccuuccagaucgaggaguucggcaccggcgucuucaccacccgcgucuacauggacgccgucuucgaguacaccaucgacugcgacggcuccauccucggcgccgccgucaacggcaagaaguccgcccacggcucccccaccuucuggaugggcucccacgaggucaacggcaccuggaugauccacacccucgaggcccucgacuacaaggagugcgaguggccccucacccacaccaucggcaccuccgucgaggaguccgagauguucaugccccgcuccaucggcggccccgucuccucccacaaccacauccccggcuacaagguccagaccaacggccccuggaugcaggucccccucgaggucaagcgcgaggccugccccggcaccuccgucaucaucgacggcaacugcgacggccgcggcaaguccacccgcuccaccaccgacuccggcaaggucauccccgaguggugcugccgcuccugcaccaugccccccgucuccuuccacggcuccgacggcugcugguaccccauggagauccgcccccgcaagacccacgagucccaccucguccgcuccugggucaccgccugaggacuagugcaucacauuuaaaagcaucucagccuaccaugagaauaagagaaagaaaaugaagaucaauagcuuauucaucucuuuuucuuuuucguugguguaaagccaacacccugucuaaaaaacauaaauuucuuuaaucauuuugccucuuuucucugugcuucaauuaauaaaaaauggaaagaaccuagaucuaaaaaaaaaaaaaaaaaaaaaaaaaaaaaaaaaaaaaaaaaaaaaaaaaaaaaaaaaaaaaaaaugcaucccccccccccccccccccccccccccccccaaaggcucuuuucagagccaccagaauu

SEQ ID NO: 2494 - RNA, 1499 nt, Artificial Sequence
  mRNA product Design i-2 comprising derived and/or modified sequence from YFV__NC_002031.1__SSIgE-NS1 (polyprotein: aa779-1130) (opt2)
gggagaggcgcugccuacggagguggcagccaucuccuucucggcaucaagcuuaccauggacuggaccuggauccucuuccucgucgccgccgccacccgcguccacuccgaccagggcugcgccaucaacuucggcaagcgcgagcucaagugcggcgacggcaucuucaucuuccgcgacuccgacgacuggcucaacaaguacuccuacuaccccgaggaccccgucaagcucgccuccaucgucaaggccuccuucgaggagggcaagugcggccucaacuccgucgacucccucgagcacgagauguggcgcucccgcgccgacgagaucaacgccaucuucgaggagaacgaggucgacaucuccgucgucguccaggaccccaagaacgucuaccagcgcggcacccaccccuucucccgcauccgcgacggccuccaguacggcuggaagaccuggggcaagaaccucgucuucucccccggccgcaagaacggcuccuucaucaucgacggcaagucccgcaaggagugccccuucuccaaccgcgucuggaacuccuuccagaucgaggaguucggcaccggcgucuucaccacccgcgucuacauggacgccgucuucgaguacaccaucgacugcgacggcuccauccucggcgccgccgucaacggcaagaaguccgcccacggcucccccaccuucuggaugggcucccacgaggucaacggcaccuggaugauccacacccucgaggcccucgacuacaaggagugcgaguggccccucacccacaccaucggcaccuccgucgaggaguccgagauguucaugccccgcuccaucggcggccccgucuccucccacaaccacauccccggcuacaagguccagaccaacggccccuggaugcaggucccccucgaggucaagcgcgaggccugccccggcaccuccgucaucaucgacggcaacugcgacggccgcggcaaguccacccgcuccaccaccgacuccggcaaggucauccccgaguggugcugccgcuccugcaccaugccccccgucuccuuccacggcuccgacggcugcugguaccccauggagauccgcccccgcaagacccacgagucccaccucguccgcuccugggucaccgccugaggacuagugcaucacauuuaaaagcaucucagccuaccaugagaauaagagaaagaaaaugaagaucaauagcuuauucaucucuuuuucuuuuucguugguguaaagccaacacccugucuaaaaaacauaaauuucuuuaaucauuuugccucuuuucucugugcuucaauuaauaaaaaauggaaagaaccuagaucuaaaaaaaaaaaaaaaaaaaaaaaaaaaaaaaaaaaaaaaaaaaaaaaaaaaaaaaaaaaaaaaaugcaucccccccccccccccccccccccccccccccaaaggcucuuuucagagccaccagaauu

SEQ ID NO: 2495 - RNA, 1649 nt, Artificial Sequence
  mRNA product Design i-2 comprising derived and/or modified sequence from YFV__NC_002031.1__eSS-NS1-Y (polyprotein: aa758-1177) (opt3)
gggagaggcgcugccuacggagguggcagccaucuccuucucggcaucaagcuuaccaugagcauguccaugauccuggugggcgucauuaugauguuccucucucuugggguuggagccgaccaggguugcgcuauaaacuuuggcaagagagagcugaaauguggggauggaaucuucauuuuuagggacucagaugacugguugaauaaguacaguuauuaccccgaagauccugugaaauuagcaagcaucguaaaggccuccuucgaggaaggcaaaugcggucugaacucuguggacucgcuagagcacgaaauguggcggucacgcgcggaugagauuaaugcuaucuuugaggaaaacgaggucgacauaagcgugguugugcaagauccaaagaaugucuaucagcgagggacccauccguucagucguaucagagacggacuccaguacggcuggaagacauggggcaaaaaccugguguuuucccccgggaggaagaauggaucuuucauuaucgaugguaaaagccggaaggaauguccuuuuuccaaccgcguauggaacucauuccagauugaggaguuuggcacugggguuuucacgaccagaguguauauggacgccgucuuugaauacacaaucgauugcgacggaaguauacuuggcgcagccgugaaugguaaaaagagcgcucacgggucuccaacuuucuggaugggaucccaugaggugaauggcaccuggaugauucacacacuggaagcauuggacuauaaggagugugaauggccccucacccauacuaucggcacaucagucgaggagagcgaaauguucaugccuaggaguauugggggaccaguuucuucccacaaccacauccccgguuacaaagugcaaaccaauggcccuuggaugcagguaccacuggaggugaagcgggaagccugcccggggacgagcgucaucauugauggaaacugugacggccgcgguaaaucgacucgaucuaccacagauuccgggaaggugauacccgaguggugcuguagaucaugcacuaugccuccaguuaguuuucauggcagcgacggauguugguaccccauggaaaucaggccucggaaaacccacgagucccaucuggugcguucuugggucacagcuggcgagauucacgccgugccauucgggcucguaagcaugaugaucgcgauggaaguuguguuacgcaagagacagggacccaaacagaugcuggucgguggcgugguccuuuugggggcaaugcuggugggacaaguuaccugaggacuagugcaucacauuuaaaagcaucucagccuaccaugagaauaagagaaagaaaaugaagaucaauagcuuauucaucucuuuuucuuuuucguugguguaaagccaacacccugucuaaaaaacauaaauuucuuuaaucauuuugccucuuuucucugugcuucaauuaauaaaaaauggaaagaaccuagaucuaaaaaaaaaaaaaaaaaaaaaaaaaaaaaaaaaaaaaaaaaaaaaaaaaaaaaaaaaaaaaaaaugcaucccccccccccccccccccccccccccccccaaaggcucuuuucagagccaccagaauu

SEQ ID NO: 2496 - RNA, 1508 nt, Artificial Sequence
  mRNA product Design i-2 comprising derived and/or modified sequence from YFV__NC_002031.1__eSS-NS1 (polyprotein: aa758-1130) (opt3)
gggagaggcgcugccuacggagguggcagccaucuccuucucggcaucaagcuuaccaugagcauguccaugauccuggugggcgucauuaugauguuccucucucuugggguuggagccgaccaggguugcgcuauaaacuuuggcaagagagagcugaaauguggggauggaaucuucauuuuuagggacucagaugacugguugaauaaguacaguuauuaccccgaagauccugugaaauuagcaagcaucguaaaggccuccuucgaggaaggcaaaugcggucugaacucuguggacucgcuagagcacgaaauguggcggucacgcgcggaugagauuaaugcuaucuuugaggaaaacgaggucgacauaagcgugguugugcaagauccaaagaaugucuaucagcgagggacccauccguucagucguaucagagacggacuccaguacggcuggaagacauggggcaaaaaccugguguuuucccccgggaggaagaauggaucuuucauuaucgaugguaaaagccggaaggaauguccuuuuuccaaccgcguauggaacucauuccagauugaggaguuuggcacugggguuuucacgaccagaguguauauggacgccgucuuugaauacacaaucgauugcgacggaaguauacuuggcgcagccgugaaugguaaaaagagcgcucacgggucuccaacuuucuggaugggaucccaugaggugaauggcaccuggaugauucacacacuggaagcauuggacuauaaggagugugaauggccccucacccauacuaucggcacaucagucgaggagagcgaaauguucaugccuaggaguauugggggaccaguuucuucccacaaccacauccccgguuacaaagugcaaaccaauggcccuuggaugcagguaccacuggaggugaagcgggaagccugcccggggacgagcgucaucauugauggaaacugugacggccgcgguaaaucgacucgaucuaccacagauuccgggaaggugauacccgaguggugcuguagaucaugcacuaugccuccaguuaguuuucauggcagcgacggauguugguaccccauggaaaucaggccucggaaaacccacgagucccaucuggugcguucuugggucacagcuugaggacuagugcaucacauuuaaaagcaucucagccuaccaugagaauaagagaaagaaaaugaagaucaauagcuuauucaucucuuuuucuuuuucguugguguaaagccaacacccugucuaaaaaacauaaauuucuuuaaucauuuugccucuuuucucugugcuucaauuaauaaaaaauggaaagaaccuagaucuaaaaaaaaaaaaaaaaaaaaaaaaaaaaaaaaaaaaaaaaaaaaaaaaaaaaaaaaaaaaaaaaugcaucccccccccccccccccccccccccccccccaaaggcucuuuucagagccaccagaauu

SEQ ID NO: 2497 - RNA, 1499 nt, Artificial Sequence
  mRNA product Design i-2 comprising derived and/or modified sequence from YFV__NC_002031.1__SSIgE-NS1 (polyprotein: aa779-1130) (opt3)
gggagaggcgcugccuacggagguggcagccaucuccuucucggcaucaagcuuaccauggacuggaccuggauccuguuccucguggccgcugcaacaagaguccacagcgaccaggguugcgcuauaaacuuuggcaagagagagcugaaauguggggauggaaucuucauuuuuagggacucagaugacugguugaauaaguacaguuauuaccccgaagauccugugaaauuagcaagcaucguaaaggccuccuucgaggaaggcaaaugcggucugaacucuguggacucgcuagagcacgaaauguggcggucacgcgcggaugagauuaaugcuaucuuugaggaaaacgaggucgacauaagcgugguugugcaagauccaaagaaugucuaucagcgagggacccauccguucagucguaucagagacggacuccaguacggcuggaagacauggggcaaaaaccugguguuuucccccgggaggaagaauggaucuuucauuaucgaugguaaaagccggaaggaauguccuuuuuccaaccgcguauggaacucauuccagauugaggaguuuggcacugggguuuucacgaccagaguguauauggacgccgucuuugaauacacaaucgauugcgacggaaguauacuuggcgcagccgugaaugguaaaaagagcgcucacgggucuccaacuuucuggaugggaucccaugaggugaauggcaccuggaugauucacacacuggaagcauuggacuauaaggagugugaauggccccucacccauacuaucggcacaucagucgaggagagcgaaauguucaugccuaggaguauugggggaccaguuucuucccacaaccacauccccgguuacaaagugcaaaccaauggcccuuggaugcagguaccacuggaggugaagcgggaagccugcccggggacgagcgucaucauugauggaaacugugacggccgcgguaaaucgacucgaucuaccacagauuccgggaaggugauacccgaguggugcuguagaucaugcacuaugccuccaguuaguuuucauggcagcgacggauguugguaccccauggaaaucaggccucggaaaacccacgagucccaucuggugcguucuugggucacagcuugaggacuagugcaucacauuuaaaagcaucucagccuaccaugagaauaagagaaagaaaaugaagaucaauagcuuauucaucucuuuuucuuuuucguugguguaaagccaacacccugucuaaaaaacauaaauuucuuuaaucauuuugccucuuuucucugugcuucaauuaauaaaaaauggaaagaaccuagaucuaaaaaaaaaaaaaaaaaaaaaaaaaaaaaaaaaaaaaaaaaaaaaaaaaaaaaaaaaaaaaaaaugcaucccccccccccccccccccccccccccccccaaaggcucuuuucagagccaccagaauu

SEQ ID NO: 2498 - RNA, 1649 nt, Artificial Sequence
  mRNA product Design i-2 comprising derived and/or modified sequence from YFV__NC_002031.1__eSS-NS1-Y (polyprotein: aa758-1177) (opt4)
gggagaggcgcugccuacggagguggcagccaucuccuucucggcaucaagcuuaccaugagcaugagcaugauccuggugggcgugaucaugauguuccugagccugggcgugggcgccgaccagggcugcgccaucaacuucggcaagagagagcugaagugcggcgacggcaucuucaucuucagagacagcgacgacuggcugaacaaguacagcuacuaccccgaggaccccgugaagcuggccagcaucgugaaggccagcuucgaggagggcaagugcggccugaacagcguggacagccuggagcacgagauguggagaagcagagccgacgagaucaacgccaucuucgaggagaacgagguggacaucagcgugguggugcaggaccccaagaacguguaccagagaggcacccaccccuucagcagaaucagagacggccugcaguacggcuggaagaccuggggcaagaaccugguguucagccccggcagaaagaacggcagcuucaucaucgacggcaagagcagaaaggagugccccuucagcaacagaguguggaacagcuuccagaucgaggaguucggcaccggcguguucaccaccagaguguacauggacgccguguucgaguacaccaucgacugcgacggcagcauccugggcgccgccgugaacggcaagaagagcgcccacggcagccccaccuucuggaugggcagccacgaggugaacggcaccuggaugauccacacccuggaggcccuggacuacaaggagugcgaguggccccugacccacaccaucggcaccagcguggaggagagcgagauguucaugcccagaagcaucggcggccccgugagcagccacaaccacauccccggcuacaaggugcagaccaacggccccuggaugcaggugccccuggaggugaagagagaggccugccccggcaccagcgugaucaucgacggcaacugcgacggcagaggcaagagcaccagaagcaccaccgacagcggcaaggugauccccgaguggugcugcagaagcugcaccaugccccccgugagcuuccacggcagcgacggcugcugguaccccauggagaucagacccagaaagacccacgagagccaccuggugagaagcugggugaccgccggcgagauccacgccgugcccuucggccuggugagcaugaugaucgccauggagguggugcugagaaagagacagggccccaagcagaugcuggugggcggcguggugcugcugggcgccaugcuggugggccaggugaccugaggacuagugcaucacauuuaaaagcaucucagccuaccaugagaauaagagaaagaaaaugaagaucaauagcuuauucaucucuuuuucuuuuucguugguguaaagccaacacccugucuaaaaaacauaaauuucuuuaaucauuuugccucuuuucucugugcuucaauuaauaaaaaauggaaagaaccuagaucuaaaaaaaaaaaaaaaaaaaaaaaaaaaaaaaaaaaaaaaaaaaaaaaaaaaaaaaaaaaaaaaaugcaucccccccccccccccccccccccccccccccaaaggcucuuuucagagccaccagaauu

SEQ ID NO: 2499 - RNA, 1508 nt, Artificial Sequence
  mRNA product Design i-2 comprising derived and/or modified sequence from YFV__NC_002031.1__eSS-NS1 (polyprotein: aa758-1130) (opt4)
gggagaggcgcugccuacggagguggcagccaucuccuucucggcaucaagcuuaccaugagcaugagcaugauccuggugggcgugaucaugauguuccugagccugggcgugggcgccgaccagggcugcgccaucaacuucggcaagagagagcugaagugcggcgacggcaucuucaucuucagagacagcgacgacuggcugaacaaguacagcuacuaccccgaggaccccgugaagcuggccagcaucgugaaggccagcuucgaggagggcaagugcggccugaacagcguggacagccuggagcacgagauguggagaagcagagccgacgagaucaacgccaucuucgaggagaacgagguggacaucagcgugguggugcaggaccccaagaacguguaccagagaggcacccaccccuucagcagaaucagagacggccugcaguacggcuggaagaccuggggcaagaaccugguguucagccccggcagaaagaacggcagcuucaucaucgacggcaagagcagaaaggagugccccuucagcaacagaguguggaacagcuuccagaucgaggaguucggcaccggcguguucaccaccagaguguacauggacgccguguucgaguacaccaucgacugcgacggcagcauccugggcgccgccgugaacggcaagaagagcgcccacggcagccccaccuucuggaugggcagccacgaggugaacggcaccuggaugauccacacccuggaggcccuggacuacaaggagugcgaguggccccugacccacaccaucggcaccagcguggaggagagcgagauguucaugcccagaagcaucggcggccccgugagcagccacaaccacauccccggcuacaaggugcagaccaacggccccuggaugcaggugccccuggaggugaagagagaggccugccccggcaccagcgugaucaucgacggcaacugcgacggcagaggcaagagcaccagaagcaccaccgacagcggcaaggugauccccgaguggugcugcagaagcugcaccaugccccccgugagcuuccacggcagcgacggcugcugguaccccauggagaucagacccagaaagacccacgagagccaccuggugagaagcugggugaccgccugaggacuagugcaucacauuuaaaagcaucucagccuaccaugagaauaagagaaagaaaaugaagaucaauagcuuauucaucucuuuuucuuuuucguugguguaaagccaacacccugucuaaaaaacauaaauuucuuuaaucauuuugccucuuuucucugugcuucaauuaauaaaaaauggaaagaaccuagaucuaaaaaaaaaaaaaaaaaaaaaaaaaaaaaaaaaaaaaaaaaaaaaaaaaaaaaaaaaaaaaaaaugcaucccccccccccccccccccccccccccccccaaaggcucuuuucagagccaccagaauu

SEQ ID NO: 2500 - RNA, 1499 nt, Artificial Sequence
  mRNA product Design i-2 comprising derived and/or modified sequence from YFV__NC_002031.1__SSIgE-NS1 (polyprotein: aa779-1130) (opt4)
gggagaggcgcugccuacggagguggcagccaucuccuucucggcaucaagcuuaccauggacuggaccuggauccuguuccugguggccgccgccaccagagugcacagcgaccagggcugcgccaucaacuucggcaagagagagcugaagugcggcgacggcaucuucaucuucagagacagcgacgacuggcugaacaaguacagcuacuaccccgaggaccccgugaagcuggccagcaucgugaaggccagcuucgaggagggcaagugcggccugaacagcguggacagccuggagcacgagauguggagaagcagagccgacgagaucaacgccaucuucgaggagaacgagguggacaucagcgugguggugcaggaccccaagaacguguaccagagaggcacccaccccuucagcagaaucagagacggccugcaguacggcuggaagaccuggggcaagaaccugguguucagccccggcagaaagaacggcagcuucaucaucgacggcaagagcagaaaggagugccccuucagcaacagaguguggaacagcuuccagaucgaggaguucggcaccggcguguucaccaccagaguguacauggacgccguguucgaguacaccaucgacugcgacggcagcauccugggcgccgccgugaacggcaagaagagcgcccacggcagccccaccuucuggaugggcagccacgaggugaacggcaccuggaugauccacacccuggaggcccuggacuacaaggagugcgaguggccccugacccacaccaucggcaccagcguggaggagagcgagauguucaugcccagaagcaucggcggccccgugagcagccacaaccacauccccggcuacaaggugcagaccaacggccccuggaugcaggugccccuggaggugaagagagaggccugccccggcaccagcgugaucaucgacggcaacugcgacggcagaggcaagagcaccagaagcaccaccgacagcggcaaggugauccccgaguggugcugcagaagcugcaccaugccccccgugagcuuccacggcagcgacggcugcugguaccccauggagaucagacccagaaagacccacgagagccaccuggugagaagcugggugaccgccugaggacuagugcaucacauuuaaaagcaucucagccuaccaugagaauaagagaaagaaaaugaagaucaauagcuuauucaucucuuuuucuuuuucguugguguaaagccaacacccugucuaaaaaacauaaauuucuuuaaucauuuugccucuuuucucugugcuucaauuaauaaaaaauggaaagaaccuagaucuaaaaaaaaaaaaaaaaaaaaaaaaaaaaaaaaaaaaaaaaaaaaaaaaaaaaaaaaaaaaaaaaugcaucccccccccccccccccccccccccccccccaaaggcucuuuucagagccaccagaauu

SEQ ID NO: 2501 - RNA, 1649 nt, Artificial Sequence
  mRNA product Design i-2 comprising derived and/or modified sequence from YFV__NC_002031.1__eSS-NS1-Y (polyprotein: aa758-1177) (opt5)
gggagaggcgcugccuacggagguggcagccaucuccuucucggcaucaagcuuaccaugagcauguccaugauccuggugggcgucauuaugauguuccucucucuggggguuggagccgaccagggcugcgcuaucaacuuugggaagagagagcuuaaauguggagauggcauuuucaucuuucgggacagcgaugacuggcugaauaaguacuccuauuaccccgaagauccugugaaacucgccucuauugugaaggcgagcuucgaggaagggaaaugcggacugaacuccgucgacucucuugagcacgaaauguggcgcagcagagcugaugagaucaaugccaucuuugaggaaaacgagguggacauuuccguugugguccaagauccgaagaauguguaucagcggggcacccaucccuucagccgcaucagagacggccugcaguacggguggaagacauggggcaaaaaccucguguuuucuccuggacggaagaauggguccuucauuaucgauggaaaaagccgcaaggaaugucccuuuucuaacagaguguggaacuccuuccagauugaggaguuuggcacgggggucuucaccacacggguguauauggacgccguguuugaauacaccaucgauugcgacggaagcauucugggcgcugccgucaauggcaaaaagucugcucacggguccccuacauucuggaugggaagccaugagguuaauggcaccuggaugauccacacacuggaagcccucgacuauaaggagugugaauggccccugacccauacgaucgggaccuccguggaggagucugaaauguucaugccucgcagcauuggaggcccgguguccagccacaaccacauccccggguacaaaguccaaacaaauggaccuuggaugcagguuccccuugagguuaagagagaagcgugcccuggcaccucugugauuaucgauggcaacugugacgggcggggaaaauccacacgcagcaccacggauucuggcaaggucauucccgaguggugcuguagaagcugcacaaugccgccuguguccuuucaugggucugacggauguugguaccccauggaaauccggccucgcaaaacccacgagagccaucugguuagauccugggugacagccggcgagauccacgcuguccccuucgggcucgugagcaugaugauugccauggaagucgugcugcggaagagacagggccccaaacagaugcuuguuggaggcgugguccugcucggggcuaugcuggugggacaaguuaccugaggacuagugcaucacauuuaaaagcaucucagccuaccaugagaauaagagaaagaaaaugaagaucaauagcuuauucaucucuuuuucuuuuucguugguguaaagccaacacccugucuaaaaaacauaaauuucuuuaaucauuuugccucuuuucucugugcuucaauuaauaaaaaauggaaagaaccuagaucuaaaaaaaaaaaaaaaaaaaaaaaaaaaaaaaaaaaaaaaaaaaaaaaaaaaaaaaaaaaaaaaaugcaucccccccccccccccccccccccccccccccaaaggcucuuuucagagccaccagaauu

SEQ ID NO: 2502 - RNA, 1508 nt, Artificial Sequence
  mRNA product Design i-2 comprising derived and/or modified sequence from YFV__NC_002031.1__eSS-NS1 (polyprotein: aa758-1130) (opt5)
gggagaggcgcugccuacggagguggcagccaucuccuucucggcaucaagcuuaccaugagcauguccaugauccuggugggcgucauuaugauguuccucucucuggggguuggagccgaccagggcugcgcuaucaacuuugggaagagagagcuuaaauguggagauggcauuuucaucuuucgggacagcgaugacuggcugaauaaguacuccuauuaccccgaagauccugugaaacucgccucuauugugaaggcgagcuucgaggaagggaaaugcggacugaacuccgucgacucucuugagcacgaaauguggcgcagcagagcugaugagaucaaugccaucuuugaggaaaacgagguggacauuuccguugugguccaagauccgaagaauguguaucagcggggcacccaucccuucagccgcaucagagacggccugcaguacggguggaagacauggggcaaaaaccucguguuuucuccuggacggaagaauggguccuucauuaucgauggaaaaagccgcaaggaaugucccuuuucuaacagaguguggaacuccuuccagauugaggaguuuggcacgggggucuucaccacacggguguauauggacgccguguuugaauacaccaucgauugcgacggaagcauucugggcgcugccgucaauggcaaaaagucugcucacggguccccuacauucuggaugggaagccaugagguuaauggcaccuggaugauccacacacuggaagcccucgacuauaaggagugugaauggccccugacccauacgaucgggaccuccguggaggagucugaaauguucaugccucgcagcauuggaggcccgguguccagccacaaccacauccccggguacaaaguccaaacaaauggaccuuggaugcagguuccccuugagguuaagagagaagcgugcccuggcaccucugugauuaucgauggcaacugugacgggcggggaaaauccacacgcagcaccacggauucuggcaaggucauucccgaguggugcuguagaagcugcacaaugccgccuguguccuuucaugggucugacggauguugguaccccauggaaauccggccucgcaaaacccacgagagccaucugguuagauccugggugacagccugaggacuagugcaucacauuuaaaagcaucucagccuaccaugagaauaagagaaagaaaaugaagaucaauagcuuauucaucucuuuuucuuuuucguugguguaaagccaacacccugucuaaaaaacauaaauuucuuuaaucauuuugccucuuuucucugugcuucaauuaauaaaaaauggaaagaaccuagaucuaaaaaaaaaaaaaaaaaaaaaaaaaaaaaaaaaaaaaaaaaaaaaaaaaaaaaaaaaaaaaaaaugcaucccccccccccccccccccccccccccccccaaaggcucuuuucagagccaccagaauu

SEQ ID NO: 2503 - RNA, 1499 nt, Artificial Sequence
  mRNA product Design i-2 comprising derived and/or modified sequence from YFV__NC_002031.1__SSIgE-NS1 (polyprotein: aa779-1130) (opt5)
gggagaggcgcugccuacggagguggcagccaucuccuucucggcaucaagcuuaccauggacuggaccuggauccuguuccucguggccgcugccacaagaguccacagcgaccagggcugcgcuaucaacuuugggaagagagagcuuaaauguggagauggcauuuucaucuuucgggacagcgaugacuggcugaauaaguacuccuauuaccccgaagauccugugaaacucgccucuauugugaaggcgagcuucgaggaagggaaaugcggacugaacuccgucgacucucuugagcacgaaauguggcgcagcagagcugaugagaucaaugccaucuuugaggaaaacgagguggacauuuccguugugguccaagauccgaagaauguguaucagcggggcacccaucccuucagccgcaucagagacggccugcaguacggguggaagacauggggcaaaaaccucguguuuucuccuggacggaagaauggguccuucauuaucgauggaaaaagccgcaaggaaugucccuuuucuaacagaguguggaacuccuuccagauugaggaguuuggcacgggggucuucaccacacggguguauauggacgccguguuugaauacaccaucgauugcgacggaagcauucugggcgcugccgucaauggcaaaaagucugcucacggguccccuacauucuggaugggaagccaugagguuaauggcaccuggaugauccacacacuggaagcccucgacuauaaggagugugaauggccccugacccauacgaucgggaccuccguggaggagucugaaauguucaugccucgcagcauuggaggcccgguguccagccacaaccacauccccggguacaaaguccaaacaaauggaccuuggaugcagguuccccuugagguuaagagagaagcgugcccuggcaccucugugauuaucgauggcaacugugacgggcggggaaaauccacacgcagcaccacggauucuggcaaggucauucccgaguggugcuguagaagcugcacaaugccgccuguguccuuucaugggucugacggauguugguaccccauggaaauccggccucgcaaaacccacgagagccaucugguuagauccugggugacagccugaggacuagugcaucacauuuaaaagcaucucagccuaccaugagaauaagagaaagaaaaugaagaucaauagcuuauucaucucuuuuucuuuuucguugguguaaagccaacacccugucuaaaaaacauaaauuucuuuaaucauuuugccucuuuucucugugcuucaauuaauaaaaaauggaaagaaccuagaucuaaaaaaaaaaaaaaaaaaaaaaaaaaaaaaaaaaaaaaaaaaaaaaaaaaaaaaaaaaaaaaaaugcaucccccccccccccccccccccccccccccccaaaggcucuuuucagagccaccagaauu

SEQ ID NO: 2504 - RNA, 1649 nt, Artificial Sequence
  mRNA product Design i-2 comprising derived and/or modified sequence from YFV__NC_002031.1__eSS-NS1-Y (polyprotein: aa758-1177) (opt6)
gggagaggcgcugccuacggagguggcagccaucuccuucucggcaucaagcuuaccaugucaaugaguaugauauuaguagggguaauaaugauguuccuuagcuuaggaguaggagcagaucaaggaugugcaauaaauuuuggaaaaagagaacuaaaaugcggagacgguauauuuauauuuagagauagugaugauuggcuaaauaaauauaguuacuauccagaagauccaguuaaauuagccucaauaguaaaagcuagcuuugaagaaggaaaauguggacuaaauucaguagacagucuagaacacgaaauguggagaucaagggcagaugaaauaaaugcaaucuuugaagaaaaugaaguggauauaucagugguaguacaagauccaaaaaauguguaccaaagaggaacacauccauuuaguaggauaagagauggauuacaauauggauggaaaacauggggaaaaaauuuaguauuuaguccaggaagaaaaaauggaucauuuauaauagaugggaaaagccgaaaagaauguccauuuucaaacagaguauggaacucauuucaaauugaagaauuuggaacaggaguauuuacaacaagaguauauauggaugcaguauuugaauacaccauagauugugauggaaguauauuaggagcagcaguaaaugggaaaaaaagcgcucacggaaguccaacguuuuggaugggaucacacgagguaaauggcacguggaugauacauacuuuagaagcauuagauuacaaagaaugugaauggccauuaacucauacaauagguacaagcguagaagaaagugagauguuuaugccacguucaaucggggggccaguaucaagucauaaccauauaccaggauauaaaguacaaacgaauggaccuuggaugcaaguaccacuagaaguaaaacgagaagcaugcccaggaacgucaguaauaauagauggaaauugugauggcagggguaaaagcacaagaucaacaacagauucaggaaaaguaauaccugaaugguguuguagaaguuguacaaugccaccaguaucauuccauggaagugauggaugcugguauccaauggaaauuagaccaagaaaaacucaugaaagucauuuaguaagaucuuggguaacugcaggagaaauacaugcaguaccauuugguuuaguaaguaugaugauagcaauggaaguaguucuaagaaaaaggcaagggccuaaacaaaugcuagugggaggaguaguauugcuaggugcaauguuaguaggccaaguaaccugaggacuagugcaucacauuuaaaagcaucucagccuaccaugagaauaagagaaagaaaaugaagaucaauagcuuauucaucucuuuuucuuuuucguugguguaaagccaacacccugucuaaaaaacauaaauuucuuuaaucauuuugccucuuuucucugugcuucaauuaauaaaaaauggaaagaaccuagaucuaaaaaaaaaaaaaaaaaaaaaaaaaaaaaaaaaaaaaaaaaaaaaaaaaaaaaaaaaaaaaaaaugcaucccccccccccccccccccccccccccccccaaaggcucuuuucagagccaccagaauu

SEQ ID NO: 2505 - RNA, 1508 nt, Artificial Sequence
  mRNA product Design i-2 comprising derived and/or modified sequence from YFV__NC_002031.1__eSS-NS1 (polyprotein: aa758-1130) (opt6)
gggagaggcgcugccuacggagguggcagccaucuccuucucggcaucaagcuuaccaugucaaugaguaugauauuaguagggguaauaaugauguuccuuagcuuaggaguaggagcagaucaaggaugugcaauaaauuuuggaaaaagagaacuaaaaugcggagacgguauauuuauauuuagagauagugaugauuggcuaaauaaauauaguuacuauccagaagauccaguuaaauuagccucaauaguaaaagcuagcuuugaagaaggaaaauguggacuaaauucaguagacagucuagaacacgaaauguggagaucaagggcagaugaaauaaaugcaaucuuugaagaaaaugaaguggauauaucagugguaguacaagauccaaaaaauguguaccaaagaggaacacauccauuuaguaggauaagagauggauuacaauauggauggaaaacauggggaaaaaauuuaguauuuaguccaggaagaaaaaauggaucauuuauaauagaugggaaaagccgaaaagaauguccauuuucaaacagaguauggaacucauuucaaauugaagaauuuggaacaggaguauuuacaacaagaguauauauggaugcaguauuugaauacaccauagauugugauggaaguauauuaggagcagcaguaaaugggaaaaaaagcgcucacggaaguccaacguuuuggaugggaucacacgagguaaauggcacguggaugauacauacuuuagaagcauuagauuacaaagaaugugaauggccauuaacucauacaauagguacaagcguagaagaaagugagauguuuaugccacguucaaucggggggccaguaucaagucauaaccauauaccaggauauaaaguacaaacgaauggaccuuggaugcaaguaccacuagaaguaaaacgagaagcaugcccaggaacgucaguaauaauagauggaaauugugauggcagggguaaaagcacaagaucaacaacagauucaggaaaaguaauaccugaaugguguuguagaaguuguacaaugccaccaguaucauuccauggaagugauggaugcugguauccaauggaaauuagaccaagaaaaacucaugaaagucauuuaguaagaucuuggguaacugcaugaggacuagugcaucacauuuaaaagcaucucagccuaccaugagaauaagagaaagaaaaugaagaucaauagcuuauucaucucuuuuucuuuuucguugguguaaagccaacacccugucuaaaaaacauaaauuucuuuaaucauuuugccucuuuucucugugcuucaauuaauaaaaaauggaaagaaccuagaucuaaaaaaaaaaaaaaaaaaaaaaaaaaaaaaaaaaaaaaaaaaaaaaaaaaaaaaaaaaaaaaaaugcaucccccccccccccccccccccccccccccccaaaggcucuuuucagagccaccagaauu

SEQ ID NO: 2506 - RNA, 1499 nt, Artificial Sequence
  mRNA product Design i-2 comprising derived and/or modified sequence from YFV__NC_002031.1__SSIgE-NS1 (polyprotein: aa779-1130) (opt6)
gggagaggcgcugccuacggagguggcagccaucuccuucucggcaucaagcuuaccauggacuggacauggauauuauuuuuaguagcagcagcaacaagaguacauucagaucaaggaugugcaauaaauuuuggaaaaagagaacuaaaaugcggagacgguauauuuauauuuagagauagugaugauuggcuaaauaaauauaguuacuauccagaagauccaguuaaauuagccucaauaguaaaagcuagcuuugaagaaggaaaauguggacuaaauucaguagacagucuagaacacgaaauguggagaucaagggcagaugaaauaaaugcaaucuuugaagaaaaugaaguggauauaucagugguaguacaagauccaaaaaauguguaccaaagaggaacacauccauuuaguaggauaagagauggauuacaauauggauggaaaacauggggaaaaaauuuaguauuuaguccaggaagaaaaaauggaucauuuauaauagaugggaaaagccgaaaagaauguccauuuucaaacagaguauggaacucauuucaaauugaagaauuuggaacaggaguauuuacaacaagaguauauauggaugcaguauuugaauacaccauagauugugauggaaguauauuaggagcagcaguaaaugggaaaaaaagcgcucacggaaguccaacguuuuggaugggaucacacgagguaaauggcacguggaugauacauacuuuagaagcauuagauuacaaagaaugugaauggccauuaacucauacaauagguacaagcguagaagaaagugagauguuuaugccacguucaaucggggggccaguaucaagucauaaccauauaccaggauauaaaguacaaacgaauggaccuuggaugcaaguaccacuagaaguaaaacgagaagcaugcccaggaacgucaguaauaauagauggaaauugugauggcagggguaaaagcacaagaucaacaacagauucaggaaaaguaauaccugaaugguguuguagaaguuguacaaugccaccaguaucauuccauggaagugauggaugcugguauccaauggaaauuagaccaagaaaaacucaugaaagucauuuaguaagaucuuggguaacugcaugaggacuagugcaucacauuuaaaagcaucucagccuaccaugagaauaagagaaagaaaaugaagaucaauagcuuauucaucucuuuuucuuuuucguugguguaaagccaacacccugucuaaaaaacauaaauuucuuuaaucauuuugccucuuuucucugugcuucaauuaauaaaaaauggaaagaaccuagaucuaaaaaaaaaaaaaaaaaaaaaaaaaaaaaaaaaaaaaaaaaaaaaaaaaaaaaaaaaaaaaaaaugcaucccccccccccccccccccccccccccccccaaaggcucuuuucagagccaccagaauu

SEQ ID NO: 2507 - RNA, 1649 nt, Artificial Sequence
  mRNA product Design i-2 comprising derived and/or modified sequence from YFV__NC_002031.1__eSS-NS1-Y (polyprotein: aa758-1177) (opt11)
gggagaggcgcugccuacggagguggcagccaucuccuucucggcaucaagcuuaccaugagcaugagcaugaucuugguaggggucauaaugauguucuugagccuagggguaggcgcagaccagggaugcgcgauaaacuucggcaaacgcgaacucaaaugcggggacggaaucuucaucuuucgcgacagugacgacuggcuaaacaaguacaguuacuacccggaagaccccguaaaacuagccucaauaguaaaagcgagcuucgaagaaggaaagugcgggcuaaacagcguggacucccuagagcacgagauguggaggucgagagcggacgagaucaacgccauauucgaagaaaaugaaguagacauaagcguagucguacaagaucccaaaaacguguaccagcgcggaacccaccccuucagcaggaucagagacgggcuacaauacggauggaagacauggggcaaaaaccuggucuucagcccgggcaggaaaaacggaucguucaucaucgauggcaaaagccgaaaggagugcccguucucaaacaggguauggaacucguuccagaucgaagaguucggcacaggcgucuucacgacaagagucuacauggacgcaguguucgaauacacaaucgacugcgacggcuccauacugggcgcagccgugaacgggaaaaagagcgcacacggaagcccgaccuuuuggauggguucgcacgaggugaacggaacauggaugauacacaccuuagaagcacucgauuacaaagaaugcgaauggcccuuaacccacaccaucgguacguccguagaagaaagcgaaauguucaugccgcgcucaaucggcggcccagucucgagccacaaccacaucccgggcuauaaaguacaaacaaacgggccauggaugcagguaccccucgaggucaagcgcgaagccugccccggaaccucggucaucaucgacggcaacugcgacggcaggggaaaaagcacgcgcucaaccacggacucgggaaagguaauaccagaguggugcugcaggagcugcaccaugccaccgguaucguuccacggcucagacggaugcugguacccgauggaaaucagacccagaaaaacgcacgagagccaccucguacgcucauggguaaccgcaggcgagauccacgccgugccauuuggacuggucucaaugaugauagcgauggaggucgugcucaggaagaggcaagggcccaagcaaaugcucguaggaggaguaguacuccugggcgcaaugcuggucggacaggugaccugaggacuagugcaucacauuuaaaagcaucucagccuaccaugagaauaagagaaagaaaaugaagaucaauagcuuauucaucucuuuuucuuuuucguugguguaaagccaacacccugucuaaaaaacauaaauuucuuuaaucauuuugccucuuuucucugugcuucaauuaauaaaaaauggaaagaaccuagaucuaaaaaaaaaaaaaaaaaaaaaaaaaaaaaaaaaaaaaaaaaaaaaaaaaaaaaaaaaaaaaaaaugcaucccccccccccccccccccccccccccccccaaaggcucuuuucagagccaccagaauu

SEQ ID NO: 2508 - RNA, 1508 nt, Artificial Sequence
  mRNA product Design i-2 comprising derived and/or modified sequence from YFV__NC_002031.1__eSS-NS1 (polyprotein: aa758-1130) (opt11)
gggagaggcgcugccuacggagguggcagccaucuccuucucggcaucaagcuuaccaugagcaugagcaugaucuugguaggggucauaaugauguucuugagccuagggguaggcgcagaccagggaugcgcgauaaacuucggcaaacgcgaacucaaaugcggggacggaaucuucaucuuucgcgacagugacgacuggcuaaacaaguacaguuacuacccggaagaccccguaaaacuagccucaauaguaaaagcgagcuucgaagaaggaaagugcgggcuaaacagcguggacucccuagagcacgagauguggaggucgagagcggacgagaucaacgccauauucgaagaaaaugaaguagacauaagcguagucguacaagaucccaaaaacguguaccagcgcggaacccaccccuucagcaggaucagagacgggcuacaauacggauggaagacauggggcaaaaaccuggucuucagcccgggcaggaaaaacggaucguucaucaucgauggcaaaagccgaaaggagugcccguucucaaacaggguauggaacucguuccagaucgaagaguucggcacaggcgucuucacgacaagagucuacauggacgcaguguucgaauacacaaucgacugcgacggcuccauacugggcgcagccgugaacgggaaaaagagcgcacacggaagcccgaccuuuuggauggguucgcacgaggugaacggaacauggaugauacacaccuuagaagcacucgauuacaaagaaugcgaauggcccuuaacccacaccaucgguacguccguagaagaaagcgaaauguucaugccgcgcucaaucggcggcccagucucgagccacaaccacaucccgggcuauaaaguacaaacaaacgggccauggaugcagguaccccucgaggucaagcgcgaagccugccccggaaccucggucaucaucgacggcaacugcgacggcaggggaaaaagcacgcgcucaaccacggacucgggaaagguaauaccagaguggugcugcaggagcugcaccaugccaccgguaucguuccacggcucagacggaugcugguacccgauggaaaucagacccagaaaaacgcacgagagccaccucguacgcucauggguaaccgcaugaggacuagugcaucacauuuaaaagcaucucagccuaccaugagaauaagagaaagaaaaugaagaucaauagcuuauucaucucuuuuucuuuuucguugguguaaagccaacacccugucuaaaaaacauaaauuucuuuaaucauuuugccucuuuucucugugcuucaauuaauaaaaaauggaaagaaccuagaucuaaaaaaaaaaaaaaaaaaaaaaaaaaaaaaaaaaaaaaaaaaaaaaaaaaaaaaaaaaaaaaaaugcaucccccccccccccccccccccccccccccccaaaggcucuuuucagagccaccagaauu

SEQ ID NO: 2509 - RNA, 1499 nt, Artificial Sequence
  mRNA product Design i-2 comprising derived and/or modified sequence from YFV__NC_002031.1__SSIgE-NS1 (polyprotein: aa779-1130) (opt11)
gggagaggcgcugccuacggagguggcagccaucuccuucucggcaucaagcuuaccauggauuggacguggauacucuuucucguggccgcggccacgcgcgugcacucggaccagggaugcgcgauaaacuucggcaaacgcgaacucaaaugcggggacggaaucuucaucuuucgcgacagugacgacuggcuaaacaaguacaguuacuacccggaagaccccguaaaacuagccucaauaguaaaagcgagcuucgaagaaggaaagugcgggcuaaacagcguggacucccuagagcacgagauguggaggucgagagcggacgagaucaacgccauauucgaagaaaaugaaguagacauaagcguagucguacaagaucccaaaaacguguaccagcgcggaacccaccccuucagcaggaucagagacgggcuacaauacggauggaagacauggggcaaaaaccuggucuucagcccgggcaggaaaaacggaucguucaucaucgauggcaaaagccgaaaggagugcccguucucaaacaggguauggaacucguuccagaucgaagaguucggcacaggcgucuucacgacaagagucuacauggacgcaguguucgaauacacaaucgacugcgacggcuccauacugggcgcagccgugaacgggaaaaagagcgcacacggaagcccgaccuuuuggauggguucgcacgaggugaacggaacauggaugauacacaccuuagaagcacucgauuacaaagaaugcgaauggcccuuaacccacaccaucgguacguccguagaagaaagcgaaauguucaugccgcgcucaaucggcggcccagucucgagccacaaccacaucccgggcuauaaaguacaaacaaacgggccauggaugcagguaccccucgaggucaagcgcgaagccugccccggaaccucggucaucaucgacggcaacugcgacggcaggggaaaaagcacgcgcucaaccacggacucgggaaagguaauaccagaguggugcugcaggagcugcaccaugccaccgguaucguuccacggcucagacggaugcugguacccgauggaaaucagacccagaaaaacgcacgagagccaccucguacgcucauggguaaccgcaugaggacuagugcaucacauuuaaaagcaucucagccuaccaugagaauaagagaaagaaaaugaagaucaauagcuuauucaucucuuuuucuuuuucguugguguaaagccaacacccugucuaaaaaacauaaauuucuuuaaucauuuugccucuuuucucugugcuucaauuaauaaaaaauggaaagaaccuagaucuaaaaaaaaaaaaaaaaaaaaaaaaaaaaaaaaaaaaaaaaaaaaaaaaaaaaaaaaaaaaaaaaugcaucccccccccccccccccccccccccccccccaaaggcucuuuucagagccaccagaauu

SEQ ID NO: 2510 - RNA, 1480 nt, Artificial Sequence
  mRNA product Design i-3 comprising derived and/or modified sequence from YFV__NC_002031.1__eSS-NS1-Y (polyprotein: aa758-1177) (wt)
gggagaaagcuuaccauguccaugagcaugaucuugguaggagugaucaugauguuuuugucucuaggaguuggggcggaucaaggaugcgccaucaacuuuggcaagagagagcucaagugcggagaugguaucuucauauuuagagacucugaugacuggcugaacaaguacucauacuauccagaagauccugugaagcuugcaucaauagugaaagccucuuuugaagaagggaaguguggccuaaauucaguugacucccuugagcaugagauguggagaagcagggcagaugagaucaaugccauuuuugaggaaaacgagguggacauuucuguugucgugcaggauccaaagaauguuuaccagagaggaacucauccauuuuccagaauucgggauggucugcaguaugguuggaagacuugggguaagaaccuuguguucuccccagggaggaagaauggaagcuucaucauagauggaaaguccaggaaagaaugcccguuuucaaaccgggucuggaauucuuuccagauagaggaguuugggacgggaguguucaccacacgcguguacauggacgcagucuuugaauacaccauagacugcgauggaucuaucuugggugcagcggugaacggaaaaaagagugcccauggcucuccaacauuuuggaugggaagucaugaaguaaaugggacauggaugauccacaccuuggaggcauuagauuacaaggagugugaguggccacugacacauacgauuggaacaucaguugaagagagugaaauguucaugccgagaucaaucggaggcccaguuagcucucacaaucauaucccuggauacaagguucagacgaacggaccuuggaugcagguaccacuagaagugaagagagaagcuugcccagggacuagcgugaucauugauggcaacugugauggacggggaaaaucaaccagauccaccacggauagcgggaaaguuauuccugaaugguguugccgcuccugcacaaugccgccugugagcuuccaugguagugauggguguugguaucccauggaaauuaggccaaggaaaacgcaugaaagccaucuggugcgcuccuggguuacagcuggagaaauacaugcugucccuuuugguuuggugagcaugaugauagcaauggaagugguccuaaggaaaagacagggaccaaagcaaauguugguuggaggaguagugcucuugggagcaaugcuggucgggcaaguaacuugaggacuaguuauaagacugacuagcccgaugggccucccaacgggcccuccuccccuccuugcaccgagauuaauaaaaaaaaaaaaaaaaaaaaaaaaaaaaaaaaaaaaaaaaaaaaaaaaaaaaaaaaaaaaaaaaugcaucccccccccccccccccccccccccccccccaaaggcucuuuucagagccaccagaauu

SEQ ID NO: 2511 - RNA, 1339 nt, Artificial Sequence
  mRNA product Design i-3 comprising derived and/or modified sequence from YFV__NC_002031.1__eSS-NS1 (polyprotein: aa758-1130) (wt)
gggagaaagcuuaccauguccaugagcaugaucuugguaggagugaucaugauguuuuugucucuaggaguuggggcggaucaaggaugcgccaucaacuuuggcaagagagagcucaagugcggagaugguaucuucauauuuagagacucugaugacuggcugaacaaguacucauacuauccagaagauccugugaagcuugcaucaauagugaaagccucuuuugaagaagggaaguguggccuaaauucaguugacucccuugagcaugagauguggagaagcagggcagaugagaucaaugccauuuuugaggaaaacgagguggacauuucuguugucgugcaggauccaaagaauguuuaccagagaggaacucauccauuuuccagaauucgggauggucugcaguaugguuggaagacuugggguaagaaccuuguguucuccccagggaggaagaauggaagcuucaucauagauggaaaguccaggaaagaaugcccguuuucaaaccgggucuggaauucuuuccagauagaggaguuugggacgggaguguucaccacacgcguguacauggacgcagucuuugaauacaccauagacugcgauggaucuaucuugggugcagcggugaacggaaaaaagagugcccauggcucuccaacauuuuggaugggaagucaugaaguaaaugggacauggaugauccacaccuuggaggcauuagauuacaaggagugugaguggccacugacacauacgauuggaacaucaguugaagagagugaaauguucaugccgagaucaaucggaggcccaguuagcucucacaaucauaucccuggauacaagguucagacgaacggaccuuggaugcagguaccacuagaagugaagagagaagcuugcccagggacuagcgugaucauugauggcaacugugauggacggggaaaaucaaccagauccaccacggauagcgggaaaguuauuccugaaugguguugccgcuccugcacaaugccgccugugagcuuccaugguagugauggguguugguaucccauggaaauuaggccaaggaaaacgcaugaaagccaucuggugcgcuccuggguuacagcuugaggacuaguuauaagacugacuagcccgaugggccucccaacgggcccuccuccccuccuugcaccgagauuaauaaaaaaaaaaaaaaaaaaaaaaaaaaaaaaaaaaaaaaaaaaaaaaaaaaaaaaaaaaaaaaaaugcaucccccccccccccccccccccccccccccccaaaggcucuuuucagagccaccagaauu

SEQ ID NO: 2512 - RNA, 1330 nt, Artificial Sequence
  mRNA product Design i-3 comprising derived and/or modified sequence from YFV__NC_002031.1__SSIgE-NS1 (polyprotein: aa779-1130) (wt)
gggagaaagcuuaccauggacuggaccuggauccuguuccucguggccgccgcgacccgcguccacagcgaucaaggaugcgccaucaacuuuggcaagagagagcucaagugcggagaugguaucuucauauuuagagacucugaugacuggcugaacaaguacucauacuauccagaagauccugugaagcuugcaucaauagugaaagccucuuuugaagaagggaaguguggccuaaauucaguugacucccuugagcaugagauguggagaagcagggcagaugagaucaaugccauuuuugaggaaaacgagguggacauuucuguugucgugcaggauccaaagaauguuuaccagagaggaacucauccauuuuccagaauucgggauggucugcaguaugguuggaagacuugggguaagaaccuuguguucuccccagggaggaagaauggaagcuucaucauagauggaaaguccaggaaagaaugcccguuuucaaaccgggucuggaauucuuuccagauagaggaguuugggacgggaguguucaccacacgcguguacauggacgcagucuuugaauacaccauagacugcgauggaucuaucuugggugcagcggugaacggaaaaaagagugcccauggcucuccaacauuuuggaugggaagucaugaaguaaaugggacauggaugauccacaccuuggaggcauuagauuacaaggagugugaguggccacugacacauacgauuggaacaucaguugaagagagugaaauguucaugccgagaucaaucggaggcccaguuagcucucacaaucauaucccuggauacaagguucagacgaacggaccuuggaugcagguaccacuagaagugaagagagaagcuugcccagggacuagcgugaucauugauggcaacugugauggacggggaaaaucaaccagauccaccacggauagcgggaaaguuauuccugaaugguguugccgcuccugcacaaugccgccugugagcuuccaugguagugauggguguugguaucccauggaaauuaggccaaggaaaacgcaugaaagccaucuggugcgcuccuggguuacagcuugaggacuaguuauaagacugacuagcccgaugggccucccaacgggcccuccuccccuccuugcaccgagauuaauaaaaaaaaaaaaaaaaaaaaaaaaaaaaaaaaaaaaaaaaaaaaaaaaaaaaaaaaaaaaaaaaugcaucccccccccccccccccccccccccccccccaaaggcucuuuucagagccaccagaauu

SEQ ID NO: 2513 - RNA, 1480 nt, Artificial Sequence
  mRNA product Design i-3 comprising derived and/or modified sequence from YFV__NC_002031.1__eSS-NS1-Y (polyprotein: aa758-1177) (opt1)
gggagaaagcuuaccaugagcauguccaugauccuggugggcgucaucaugauguuccucagccugggggugggcgccgaccaggggugcgccaucaacuucggcaagcgcgagcugaagugcggggacggcaucuucaucuuccgggacuccgacgacuggcucaacaaguacagcuacuaccccgaggacccggugaagcuggcguccaucgucaaggccagcuucgaggagggcaagugcgggcugaacuccguggacagccucgagcacgagauguggcgcucccgggccgacgagaucaacgccaucuucgaggagaacgagguggacaucagcgucguggugcaggaccccaagaacgucuaccagcgcggcacccaccccuucucccggauccgcgacgggcugcaguacggcuggaagaccugggggaagaaccugguguucagccccggccggaagaacggcuccuucaucaucgacggcaagagccgcaaggagugcccguucuccaaccggguguggaacagcuuccagaucgaggaguucgggacgggggucuucaccacccgcguguacauggacgccguguucgaguacaccaucgacugcgacggcuccauccucggcgcggccgucaacgggaagaaguccgcccacggcagccccacguucuggauggggagccacgaggugaacggcaccuggaugauccacacccuggaggcccuggacuacaaggagugcgaguggccccucacccacacgaucgggaccagcguggaggaguccgagauguucaugccccggagcaucggcggcccggucuccagccacaaccacauccccggguacaaggugcagaccaacggccccuggaugcaggucccccuggaggugaagcgcgaggcgugcccggggaccuccgugaucaucgacggcaacugcgacgggcggggcaagagcacgcgcuccaccaccgacagcggcaaggugauccccgaguggugcugccgguccugcaccaugccgcccgucagcuuccacggguccgacggcugcugguaccccauggagauccgcccccggaagacgcacgagagccaccuggugcgcuccugggucaccgccggggagauccacgccgugcccuucggccucgugagcaugaugaucgccauggaggucgugcugcggaagcgccaggggcccaagcagaugcuggugggcggcgucgugcuccugggggccaugcuggugggccaggucaccugaggacuaguuauaagacugacuagcccgaugggccucccaacgggcccuccuccccuccuugcaccgagauuaauaaaaaaaaaaaaaaaaaaaaaaaaaaaaaaaaaaaaaaaaaaaaaaaaaaaaaaaaaaaaaaaaugcaucccccccccccccccccccccccccccccccaaaggcucuuuucagagccaccagaauu

SEQ ID NO: 2514 - RNA, 1339 nt, Artificial Sequence
  mRNA product Design i-3 comprising derived and/or modified sequence from YFV__NC_002031.1__eSS-NS1 (polyprotein: aa758-1130) (opt1)
gggagaaagcuuaccaugagcauguccaugauccuggugggcgucaucaugauguuccucagccugggggugggcgccgaccaggggugcgccaucaacuucggcaagcgcgagcugaagugcggggacggcaucuucaucuuccgggacuccgacgacuggcucaacaaguacagcuacuaccccgaggacccggugaagcuggcguccaucgucaaggccagcuucgaggagggcaagugcgggcugaacuccguggacagccucgagcacgagauguggcgcucccgggccgacgagaucaacgccaucuucgaggagaacgagguggacaucagcgucguggugcaggaccccaagaacgucuaccagcgcggcacccaccccuucucccggauccgcgacgggcugcaguacggcuggaagaccugggggaagaaccugguguucagccccggccggaagaacggcuccuucaucaucgacggcaagagccgcaaggagugcccguucuccaaccggguguggaacagcuuccagaucgaggaguucgggacgggggucuucaccacccgcguguacauggacgccguguucgaguacaccaucgacugcgacggcuccauccucggcgcggccgucaacgggaagaaguccgcccacggcagccccacguucuggauggggagccacgaggugaacggcaccuggaugauccacacccuggaggcccuggacuacaaggagugcgaguggccccucacccacacgaucgggaccagcguggaggaguccgagauguucaugccccggagcaucggcggcccggucuccagccacaaccacauccccggguacaaggugcagaccaacggccccuggaugcaggucccccuggaggugaagcgcgaggcgugcccggggaccuccgugaucaucgacggcaacugcgacgggcggggcaagagcacgcgcuccaccaccgacagcggcaaggugauccccgaguggugcugccgguccugcaccaugccgcccgucagcuuccacggguccgacggcugcugguaccccauggagauccgcccccggaagacgcacgagagccaccuggugcgcuccugggucaccgccugaggacuaguuauaagacugacuagcccgaugggccucccaacgggcccuccuccccuccuugcaccgagauuaauaaaaaaaaaaaaaaaaaaaaaaaaaaaaaaaaaaaaaaaaaaaaaaaaaaaaaaaaaaaaaaaaugcaucccccccccccccccccccccccccccccccaaaggcucuuuucagagccaccagaauu

SEQ ID NO: 2515 - RNA, 1330 nt, Artificial Sequence
  mRNA product Design i-3 comprising derived and/or modified sequence from YFV__NC_002031.1__SSIgE-NS1 (polyprotein: aa779-1130) (opt1)
gggagaaagcuuaccauggacuggaccuggauccuguuccucguggccgccgcgacccgcguccacagcgaccaggggugcgccaucaacuucggcaagcgcgagcugaagugcggggacggcaucuucaucuuccgggacuccgacgacuggcucaacaaguacagcuacuaccccgaggacccggugaagcuggcguccaucgucaaggccagcuucgaggagggcaagugcgggcugaacuccguggacagccucgagcacgagauguggcgcucccgggccgacgagaucaacgccaucuucgaggagaacgagguggacaucagcgucguggugcaggaccccaagaacgucuaccagcgcggcacccaccccuucucccggauccgcgacgggcugcaguacggcuggaagaccugggggaagaaccugguguucagccccggccggaagaacggcuccuucaucaucgacggcaagagccgcaaggagugcccguucuccaaccggguguggaacagcuuccagaucgaggaguucgggacgggggucuucaccacccgcguguacauggacgccguguucgaguacaccaucgacugcgacggcuccauccucggcgcggccgucaacgggaagaaguccgcccacggcagccccacguucuggauggggagccacgaggugaacggcaccuggaugauccacacccuggaggcccuggacuacaaggagugcgaguggccccucacccacacgaucgggaccagcguggaggaguccgagauguucaugccccggagcaucggcggcccggucuccagccacaaccacauccccggguacaaggugcagaccaacggccccuggaugcaggucccccuggaggugaagcgcgaggcgugcccggggaccuccgugaucaucgacggcaacugcgacgggcggggcaagagcacgcgcuccaccaccgacagcggcaaggugauccccgaguggugcugccgguccugcaccaugccgcccgucagcuuccacggguccgacggcugcugguaccccauggagauccgcccccggaagacgcacgagagccaccuggugcgcuccugggucaccgccugaggacuaguuauaagacugacuagcccgaugggccucccaacgggcccuccuccccuccuugcaccgagauuaauaaaaaaaaaaaaaaaaaaaaaaaaaaaaaaaaaaaaaaaaaaaaaaaaaaaaaaaaaaaaaaaaugcaucccccccccccccccccccccccccccccccaaaggcucuuuucagagccaccagaauu

SEQ ID NO: 2516 - RNA, 1480 nt, Artificial Sequence
  mRNA product Design i-3 comprising derived and/or modified sequence from YFV__NC_002031.1__eSS-NS1-Y (polyprotein: aa758-1177) (opt2)
gggagaaagcuuaccauguccauguccaugauccucgucggcgucaucaugauguuccucucccucggcgucggcgccgaccagggcugcgccaucaacuucggcaagcgcgagcucaagugcggcgacggcaucuucaucuuccgcgacuccgacgacuggcucaacaaguacuccuacuaccccgaggaccccgucaagcucgccuccaucgucaaggccuccuucgaggagggcaagugcggccucaacuccgucgacucccucgagcacgagauguggcgcucccgcgccgacgagaucaacgccaucuucgaggagaacgaggucgacaucuccgucgucguccaggaccccaagaacgucuaccagcgcggcacccaccccuucucccgcauccgcgacggccuccaguacggcuggaagaccuggggcaagaaccucgucuucucccccggccgcaagaacggcuccuucaucaucgacggcaagucccgcaaggagugccccuucuccaaccgcgucuggaacuccuuccagaucgaggaguucggcaccggcgucuucaccacccgcgucuacauggacgccgucuucgaguacaccaucgacugcgacggcuccauccucggcgccgccgucaacggcaagaaguccgcccacggcucccccaccuucuggaugggcucccacgaggucaacggcaccuggaugauccacacccucgaggcccucgacuacaaggagugcgaguggccccucacccacaccaucggcaccuccgucgaggaguccgagauguucaugccccgcuccaucggcggccccgucuccucccacaaccacauccccggcuacaagguccagaccaacggccccuggaugcaggucccccucgaggucaagcgcgaggccugccccggcaccuccgucaucaucgacggcaacugcgacggccgcggcaaguccacccgcuccaccaccgacuccggcaaggucauccccgaguggugcugccgcuccugcaccaugccccccgucuccuuccacggcuccgacggcugcugguaccccauggagauccgcccccgcaagacccacgagucccaccucguccgcuccugggucaccgccggcgagauccacgccguccccuucggccucgucuccaugaugaucgccauggaggucguccuccgcaagcgccagggccccaagcagaugcucgucggcggcgucguccuccucggcgccaugcucgucggccaggucaccugaggacuaguuauaagacugacuagcccgaugggccucccaacgggcccuccuccccuccuugcaccgagauuaauaaaaaaaaaaaaaaaaaaaaaaaaaaaaaaaaaaaaaaaaaaaaaaaaaaaaaaaaaaaaaaaaugcaucccccccccccccccccccccccccccccccaaaggcucuuuucagagccaccagaauu

SEQ ID NO: 2517 - RNA, 1339 nt, Artificial Sequence
  mRNA product Design i-3 comprising derived and/or modified sequence from YFV__NC_002031.1__eSS-NS1 (polyprotein: aa758-1130) (opt2)
gggagaaagcuuaccauguccauguccaugauccucgucggcgucaucaugauguuccucucccucggcgucggcgccgaccagggcugcgccaucaacuucggcaagcgcgagcucaagugcggcgacggcaucuucaucuuccgcgacuccgacgacuggcucaacaaguacuccuacuaccccgaggaccccgucaagcucgccuccaucgucaaggccuccuucgaggagggcaagugcggccucaacuccgucgacucccucgagcacgagauguggcgcucccgcgccgacgagaucaacgccaucuucgaggagaacgaggucgacaucuccgucgucguccaggaccccaagaacgucuaccagcgcggcacccaccccuucucccgcauccgcgacggccuccaguacggcuggaagaccuggggcaagaaccucgucuucucccccggccgcaagaacggcuccuucaucaucgacggcaagucccgcaaggagugccccuucuccaaccgcgucuggaacuccuuccagaucgaggaguucggcaccggcgucuucaccacccgcgucuacauggacgccgucuucgaguacaccaucgacugcgacggcuccauccucggcgccgccgucaacggcaagaaguccgcccacggcucccccaccuucuggaugggcucccacgaggucaacggcaccuggaugauccacacccucgaggcccucgacuacaaggagugcgaguggccccucacccacaccaucggcaccuccgucgaggaguccgagauguucaugccccgcuccaucggcggccccgucuccucccacaaccacauccccggcuacaagguccagaccaacggccccuggaugcaggucccccucgaggucaagcgcgaggccugccccggcaccuccgucaucaucgacggcaacugcgacggccgcggcaaguccacccgcuccaccaccgacuccggcaaggucauccccgaguggugcugccgcuccugcaccaugccccccgucuccuuccacggcuccgacggcugcugguaccccauggagauccgcccccgcaagacccacgagucccaccucguccgcuccugggucaccgccugaggacuaguuauaagacugacuagcccgaugggccucccaacgggcccuccuccccuccuugcaccgagauuaauaaaaaaaaaaaaaaaaaaaaaaaaaaaaaaaaaaaaaaaaaaaaaaaaaaaaaaaaaaaaaaaaugcaucccccccccccccccccccccccccccccccaaaggcucuuuucagagccaccagaauu

SEQ ID NO: 2518 - RNA, 1330 nt, Artificial Sequence
  mRNA product Design i-3 comprising derived and/or modified sequence from YFV__NC_002031.1__SSIgE-NS1 (polyprotein: aa779-1130) (opt2)
gggagaaagcuuaccauggacuggaccuggauccucuuccucgucgccgccgccacccgcguccacuccgaccagggcugcgccaucaacuucggcaagcgcgagcucaagugcggcgacggcaucuucaucuuccgcgacuccgacgacuggcucaacaaguacuccuacuaccccgaggaccccgucaagcucgccuccaucgucaaggccuccuucgaggagggcaagugcggccucaacuccgucgacucccucgagcacgagauguggcgcucccgcgccgacgagaucaacgccaucuucgaggagaacgaggucgacaucuccgucgucguccaggaccccaagaacgucuaccagcgcggcacccaccccuucucccgcauccgcgacggccuccaguacggcuggaagaccuggggcaagaaccucgucuucucccccggccgcaagaacggcuccuucaucaucgacggcaagucccgcaaggagugccccuucuccaaccgcgucuggaacuccuuccagaucgaggaguucggcaccggcgucuucaccacccgcgucuacauggacgccgucuucgaguacaccaucgacugcgacggcuccauccucggcgccgccgucaacggcaagaaguccgcccacggcucccccaccuucuggaugggcucccacgaggucaacggcaccuggaugauccacacccucgaggcccucgacuacaaggagugcgaguggccccucacccacaccaucggcaccuccgucgaggaguccgagauguucaugccccgcuccaucggcggccccgucuccucccacaaccacauccccggcuacaagguccagaccaacggccccuggaugcaggucccccucgaggucaagcgcgaggccugccccggcaccuccgucaucaucgacggcaacugcgacggccgcggcaaguccacccgcuccaccaccgacuccggcaaggucauccccgaguggugcugccgcuccugcaccaugccccccgucuccuuccacggcuccgacggcugcugguaccccauggagauccgcccccgcaagacccacgagucccaccucguccgcuccugggucaccgccugaggacuaguuauaagacugacuagcccgaugggccucccaacgggcccuccuccccuccuugcaccgagauuaauaaaaaaaaaaaaaaaaaaaaaaaaaaaaaaaaaaaaaaaaaaaaaaaaaaaaaaaaaaaaaaaaugcaucccccccccccccccccccccccccccccccaaaggcucuuuucagagccaccagaauu

SEQ ID NO: 2519 - RNA, 1480 nt, Artificial Sequence
  mRNA product Design i-3 comprising derived and/or modified sequence from YFV__NC_002031.1__eSS-NS1-Y (polyprotein: aa758-1177) (opt3)
gggagaaagcuuaccaugagcauguccaugauccuggugggcgucauuaugauguuccucucucuugggguuggagccgaccaggguugcgcuauaaacuuuggcaagagagagcugaaauguggggauggaaucuucauuuuuagggacucagaugacugguugaauaaguacaguuauuaccccgaagauccugugaaauuagcaagcaucguaaaggccuccuucgaggaaggcaaaugcggucugaacucuguggacucgcuagagcacgaaauguggcggucacgcgcggaugagauuaaugcuaucuuugaggaaaacgaggucgacauaagcgugguugugcaagauccaaagaaugucuaucagcgagggacccauccguucagucguaucagagacggacuccaguacggcuggaagacauggggcaaaaaccugguguuuucccccgggaggaagaauggaucuuucauuaucgaugguaaaagccggaaggaauguccuuuuuccaaccgcguauggaacucauuccagauugaggaguuuggcacugggguuuucacgaccagaguguauauggacgccgucuuugaauacacaaucgauugcgacggaaguauacuuggcgcagccgugaaugguaaaaagagcgcucacgggucuccaacuuucuggaugggaucccaugaggugaauggcaccuggaugauucacacacuggaagcauuggacuauaaggagugugaauggccccucacccauacuaucggcacaucagucgaggagagcgaaauguucaugccuaggaguauugggggaccaguuucuucccacaaccacauccccgguuacaaagugcaaaccaauggcccuuggaugcagguaccacuggaggugaagcgggaagccugcccggggacgagcgucaucauugauggaaacugugacggccgcgguaaaucgacucgaucuaccacagauuccgggaaggugauacccgaguggugcuguagaucaugcacuaugccuccaguuaguuuucauggcagcgacggauguugguaccccauggaaaucaggccucggaaaacccacgagucccaucuggugcguucuugggucacagcuggcgagauucacgccgugccauucgggcucguaagcaugaugaucgcgauggaaguuguguuacgcaagagacagggacccaaacagaugcuggucgguggcgugguccuuuugggggcaaugcuggugggacaaguuaccugaggacuaguuauaagacugacuagcccgaugggccucccaacgggcccuccuccccuccuugcaccgagauuaauaaaaaaaaaaaaaaaaaaaaaaaaaaaaaaaaaaaaaaaaaaaaaaaaaaaaaaaaaaaaaaaaugcaucccccccccccccccccccccccccccccccaaaggcucuuuucagagccaccagaauu

SEQ ID NO: 2520 - RNA, 1339 nt, Artificial Sequence
  mRNA product Design i-3 comprising derived and/or modified sequence from YFV__NC_002031.1__eSS-NS1 (polyprotein: aa758-1130) (opt3)
gggagaaagcuuaccaugagcauguccaugauccuggugggcgucauuaugauguuccucucucuugggguuggagccgaccaggguugcgcuauaaacuuuggcaagagagagcugaaauguggggauggaaucuucauuuuuagggacucagaugacugguugaauaaguacaguuauuaccccgaagauccugugaaauuagcaagcaucguaaaggccuccuucgaggaaggcaaaugcggucugaacucuguggacucgcuagagcacgaaauguggcggucacgcgcggaugagauuaaugcuaucuuugaggaaaacgaggucgacauaagcgugguugugcaagauccaaagaaugucuaucagcgagggacccauccguucagucguaucagagacggacuccaguacggcuggaagacauggggcaaaaaccugguguuuucccccgggaggaagaauggaucuuucauuaucgaugguaaaagccggaaggaauguccuuuuuccaaccgcguauggaacucauuccagauugaggaguuuggcacugggguuuucacgaccagaguguauauggacgccgucuuugaauacacaaucgauugcgacggaaguauacuuggcgcagccgugaaugguaaaaagagcgcucacgggucuccaacuuucuggaugggaucccaugaggugaauggcaccuggaugauucacacacuggaagcauuggacuauaaggagugugaauggccccucacccauacuaucggcacaucagucgaggagagcgaaauguucaugccuaggaguauugggggaccaguuucuucccacaaccacauccccgguuacaaagugcaaaccaauggcccuuggaugcagguaccacuggaggugaagcgggaagccugcccggggacgagcgucaucauugauggaaacugugacggccgcgguaaaucgacucgaucuaccacagauuccgggaaggugauacccgaguggugcuguagaucaugcacuaugccuccaguuaguuuucauggcagcgacggauguugguaccccauggaaaucaggccucggaaaacccacgagucccaucuggugcguucuugggucacagcuugaggacuaguuauaagacugacuagcccgaugggccucccaacgggcccuccuccccuccuugcaccgagauuaauaaaaaaaaaaaaaaaaaaaaaaaaaaaaaaaaaaaaaaaaaaaaaaaaaaaaaaaaaaaaaaaaugcaucccccccccccccccccccccccccccccccaaaggcucuuuucagagccaccagaauu

SEQ ID NO: 2521 - RNA, 1330 nt, Artificial Sequence
  mRNA product Design i-3 comprising derived and/or modified sequence from YFV__NC_002031.1__SSIgE-NS1 (polyprotein: aa779-1130) (opt3)
gggagaaagcuuaccauggacuggaccuggauccuguuccucguggccgcugcaacaagaguccacagcgaccaggguugcgcuauaaacuuuggcaagagagagcugaaauguggggauggaaucuucauuuuuagggacucagaugacugguugaauaaguacaguuauuaccccgaagauccugugaaauuagcaagcaucguaaaggccuccuucgaggaaggcaaaugcggucugaacucuguggacucgcuagagcacgaaauguggcggucacgcgcggaugagauuaaugcuaucuuugaggaaaacgaggucgacauaagcgugguugugcaagauccaaagaaugucuaucagcgagggacccauccguucagucguaucagagacggacuccaguacggcuggaagacauggggcaaaaaccugguguuuucccccgggaggaagaauggaucuuucauuaucgaugguaaaagccggaaggaauguccuuuuuccaaccgcguauggaacucauuccagauugaggaguuuggcacugggguuuucacgaccagaguguauauggacgccgucuuugaauacacaaucgauugcgacggaaguauacuuggcgcagccgugaaugguaaaaagagcgcucacgggucuccaacuuucuggaugggaucccaugaggugaauggcaccuggaugauucacacacuggaagcauuggacuauaaggagugugaauggccccucacccauacuaucggcacaucagucgaggagagcgaaauguucaugccuaggaguauugggggaccaguuucuucccacaaccacauccccgguuacaaagugcaaaccaauggcccuuggaugcagguaccacuggaggugaagcgggaagccugcccggggacgagcgucaucauugauggaaacugugacggccgcgguaaaucgacucgaucuaccacagauuccgggaaggugauacccgaguggugcuguagaucaugcacuaugccuccaguuaguuuucauggcagcgacggauguugguaccccauggaaaucaggccucggaaaacccacgagucccaucuggugcguucuugggucacagcuugaggacuaguuauaagacugacuagcccgaugggccucccaacgggcccuccuccccuccuugcaccgagauuaauaaaaaaaaaaaaaaaaaaaaaaaaaaaaaaaaaaaaaaaaaaaaaaaaaaaaaaaaaaaaaaaaugcaucccccccccccccccccccccccccccccccaaaggcucuuuucagagccaccagaauu

SEQ ID NO: 2522 - RNA, 1480 nt, Artificial Sequence
  mRNA product Design i-3 comprising derived and/or modified sequence from YFV__NC_002031.1__eSS-NS1-Y (polyprotein: aa758-1177) (opt4)
gggagaaagcuuaccaugagcaugagcaugauccuggugggcgugaucaugauguuccugagccugggcgugggcgccgaccagggcugcgccaucaacuucggcaagagagagcugaagugcggcgacggcaucuucaucuucagagacagcgacgacuggcugaacaaguacagcuacuaccccgaggaccccgugaagcuggccagcaucgugaaggccagcuucgaggagggcaagugcggccugaacagcguggacagccuggagcacgagauguggagaagcagagccgacgagaucaacgccaucuucgaggagaacgagguggacaucagcgugguggugcaggaccccaagaacguguaccagagaggcacccaccccuucagcagaaucagagacggccugcaguacggcuggaagaccuggggcaagaaccugguguucagccccggcagaaagaacggcagcuucaucaucgacggcaagagcagaaaggagugccccuucagcaacagaguguggaacagcuuccagaucgaggaguucggcaccggcguguucaccaccagaguguacauggacgccguguucgaguacaccaucgacugcgacggcagcauccugggcgccgccgugaacggcaagaagagcgcccacggcagccccaccuucuggaugggcagccacgaggugaacggcaccuggaugauccacacccuggaggcccuggacuacaaggagugcgaguggccccugacccacaccaucggcaccagcguggaggagagcgagauguucaugcccagaagcaucggcggccccgugagcagccacaaccacauccccggcuacaaggugcagaccaacggccccuggaugcaggugccccuggaggugaagagagaggccugccccggcaccagcgugaucaucgacggcaacugcgacggcagaggcaagagcaccagaagcaccaccgacagcggcaaggugauccccgaguggugcugcagaagcugcaccaugccccccgugagcuuccacggcagcgacggcugcugguaccccauggagaucagacccagaaagacccacgagagccaccuggugagaagcugggugaccgccggcgagauccacgccgugcccuucggccuggugagcaugaugaucgccauggagguggugcugagaaagagacagggccccaagcagaugcuggugggcggcguggugcugcugggcgccaugcuggugggccaggugaccugaggacuaguuauaagacugacuagcccgaugggccucccaacgggcccuccuccccuccuugcaccgagauuaauaaaaaaaaaaaaaaaaaaaaaaaaaaaaaaaaaaaaaaaaaaaaaaaaaaaaaaaaaaaaaaaaugcaucccccccccccccccccccccccccccccccaaaggcucuuuucagagccaccagaauu

SEQ ID NO: 2523 - RNA, 1339 nt, Artificial Sequence
  mRNA product Design i-3 comprising derived and/or modified sequence from YFV__NC_002031.1__eSS-NS1 (polyprotein: aa758-1130) (opt4)
gggagaaagcuuaccaugagcaugagcaugauccuggugggcgugaucaugauguuccugagccugggcgugggcgccgaccagggcugcgccaucaacuucggcaagagagagcugaagugcggcgacggcaucuucaucuucagagacagcgacgacuggcugaacaaguacagcuacuaccccgaggaccccgugaagcuggccagcaucgugaaggccagcuucgaggagggcaagugcggccugaacagcguggacagccuggagcacgagauguggagaagcagagccgacgagaucaacgccaucuucgaggagaacgagguggacaucagcgugguggugcaggaccccaagaacguguaccagagaggcacccaccccuucagcagaaucagagacggccugcaguacggcuggaagaccuggggcaagaaccugguguucagccccggcagaaagaacggcagcuucaucaucgacggcaagagcagaaaggagugccccuucagcaacagaguguggaacagcuuccagaucgaggaguucggcaccggcguguucaccaccagaguguacauggacgccguguucgaguacaccaucgacugcgacggcagcauccugggcgccgccgugaacggcaagaagagcgcccacggcagccccaccuucuggaugggcagccacgaggugaacggcaccuggaugauccacacccuggaggcccuggacuacaaggagugcgaguggccccugacccacaccaucggcaccagcguggaggagagcgagauguucaugcccagaagcaucggcggccccgugagcagccacaaccacauccccggcuacaaggugcagaccaacggccccuggaugcaggugccccuggaggugaagagagaggccugccccggcaccagcgugaucaucgacggcaacugcgacggcagaggcaagagcaccagaagcaccaccgacagcggcaaggugauccccgaguggugcugcagaagcugcaccaugccccccgugagcuuccacggcagcgacggcugcugguaccccauggagaucagacccagaaagacccacgagagccaccuggugagaagcugggugaccgccugaggacuaguuauaagacugacuagcccgaugggccucccaacgggcccuccuccccuccuugcaccgagauuaauaaaaaaaaaaaaaaaaaaaaaaaaaaaaaaaaaaaaaaaaaaaaaaaaaaaaaaaaaaaaaaaaugcaucccccccccccccccccccccccccccccccaaaggcucuuuucagagccaccagaauu

SEQ ID NO: 2524 - RNA, 1330 nt, Artificial Sequence
  mRNA product Design i-3 comprising derived and/or modified sequence from YFV__NC_002031.1__SSIgE-NS1 (polyprotein: aa779-1130) (opt4)
gggagaaagcuuaccauggacuggaccuggauccuguuccugguggccgccgccaccagagugcacagcgaccagggcugcgccaucaacuucggcaagagagagcugaagugcggcgacggcaucuucaucuucagagacagcgacgacuggcugaacaaguacagcuacuaccccgaggaccccgugaagcuggccagcaucgugaaggccagcuucgaggagggcaagugcggccugaacagcguggacagccuggagcacgagauguggagaagcagagccgacgagaucaacgccaucuucgaggagaacgagguggacaucagcgugguggugcaggaccccaagaacguguaccagagaggcacccaccccuucagcagaaucagagacggccugcaguacggcuggaagaccuggggcaagaaccugguguucagccccggcagaaagaacggcagcuucaucaucgacggcaagagcagaaaggagugccccuucagcaacagaguguggaacagcuuccagaucgaggaguucggcaccggcguguucaccaccagaguguacauggacgccguguucgaguacaccaucgacugcgacggcagcauccugggcgccgccgugaacggcaagaagagcgcccacggcagccccaccuucuggaugggcagccacgaggugaacggcaccuggaugauccacacccuggaggcccuggacuacaaggagugcgaguggccccugacccacaccaucggcaccagcguggaggagagcgagauguucaugcccagaagcaucggcggccccgugagcagccacaaccacauccccggcuacaaggugcagaccaacggccccuggaugcaggugccccuggaggugaagagagaggccugccccggcaccagcgugaucaucgacggcaacugcgacggcagaggcaagagcaccagaagcaccaccgacagcggcaaggugauccccgaguggugcugcagaagcugcaccaugccccccgugagcuuccacggcagcgacggcugcugguaccccauggagaucagacccagaaagacccacgagagccaccuggugagaagcugggugaccgccugaggacuaguuauaagacugacuagcccgaugggccucccaacgggcccuccuccccuccuugcaccgagauuaauaaaaaaaaaaaaaaaaaaaaaaaaaaaaaaaaaaaaaaaaaaaaaaaaaaaaaaaaaaaaaaaaugcaucccccccccccccccccccccccccccccccaaaggcucuuuucagagccaccagaauu

SEQ ID NO: 2525 - RNA, 1480 nt, Artificial Sequence
  mRNA product Design i-3 comprising derived and/or modified sequence from YFV__NC_002031.1__eSS-NS1-Y (polyprotein: aa758-1177) (opt5)
gggagaaagcuuaccaugagcauguccaugauccuggugggcgucauuaugauguuccucucucuggggguuggagccgaccagggcugcgcuaucaacuuugggaagagagagcuuaaauguggagauggcauuuucaucuuucgggacagcgaugacuggcugaauaaguacuccuauuaccccgaagauccugugaaacucgccucuauugugaaggcgagcuucgaggaagggaaaugcggacugaacuccgucgacucucuugagcacgaaauguggcgcagcagagcugaugagaucaaugccaucuuugaggaaaacgagguggacauuuccguugugguccaagauccgaagaauguguaucagcggggcacccaucccuucagccgcaucagagacggccugcaguacggguggaagacauggggcaaaaaccucguguuuucuccuggacggaagaauggguccuucauuaucgauggaaaaagccgcaaggaaugucccuuuucuaacagaguguggaacuccuuccagauugaggaguuuggcacgggggucuucaccacacggguguauauggacgccguguuugaauacaccaucgauugcgacggaagcauucugggcgcugccgucaauggcaaaaagucugcucacggguccccuacauucuggaugggaagccaugagguuaauggcaccuggaugauccacacacuggaagcccucgacuauaaggagugugaauggccccugacccauacgaucgggaccuccguggaggagucugaaauguucaugccucgcagcauuggaggcccgguguccagccacaaccacauccccggguacaaaguccaaacaaauggaccuuggaugcagguuccccuugagguuaagagagaagcgugcccuggcaccucugugauuaucgauggcaacugugacgggcggggaaaauccacacgcagcaccacggauucuggcaaggucauucccgaguggugcuguagaagcugcacaaugccgccuguguccuuucaugggucugacggauguugguaccccauggaaauccggccucgcaaaacccacgagagccaucugguuagauccugggugacagccggcgagauccacgcuguccccuucgggcucgugagcaugaugauugccauggaagucgugcugcggaagagacagggccccaaacagaugcuuguuggaggcgugguccugcucggggcuaugcuggugggacaaguuaccugaggacuaguuauaagacugacuagcccgaugggccucccaacgggcccuccuccccuccuugcaccgagauuaauaaaaaaaaaaaaaaaaaaaaaaaaaaaaaaaaaaaaaaaaaaaaaaaaaaaaaaaaaaaaaaaaugcaucccccccccccccccccccccccccccccccaaaggcucuuuucagagccaccagaauu

SEQ ID NO: 2526 - RNA, 1339 nt, Artificial Sequence
  mRNA product Design i-3 comprising derived and/or modified sequence from YFV__NC_002031.1__eSS-NS1 (polyprotein: aa758-1130) (opt5)
gggagaaagcuuaccaugagcauguccaugauccuggugggcgucauuaugauguuccucucucuggggguuggagccgaccagggcugcgcuaucaacuuugggaagagagagcuuaaauguggagauggcauuuucaucuuucgggacagcgaugacuggcugaauaaguacuccuauuaccccgaagauccugugaaacucgccucuauugugaaggcgagcuucgaggaagggaaaugcggacugaacuccgucgacucucuugagcacgaaauguggcgcagcagagcugaugagaucaaugccaucuuugaggaaaacgagguggacauuuccguugugguccaagauccgaagaauguguaucagcggggcacccaucccuucagccgcaucagagacggccugcaguacggguggaagacauggggcaaaaaccucguguuuucuccuggacggaagaauggguccuucauuaucgauggaaaaagccgcaaggaaugucccuuuucuaacagaguguggaacuccuuccagauugaggaguuuggcacgggggucuucaccacacggguguauauggacgccguguuugaauacaccaucgauugcgacggaagcauucugggcgcugccgucaauggcaaaaagucugcucacggguccccuacauucuggaugggaagccaugagguuaauggcaccuggaugauccacacacuggaagcccucgacuauaaggagugugaauggccccugacccauacgaucgggaccuccguggaggagucugaaauguucaugccucgcagcauuggaggcccgguguccagccacaaccacauccccggguacaaaguccaaacaaauggaccuuggaugcagguuccccuugagguuaagagagaagcgugcccuggcaccucugugauuaucgauggcaacugugacgggcggggaaaauccacacgcagcaccacggauucuggcaaggucauucccgaguggugcuguagaagcugcacaaugccgccuguguccuuucaugggucugacggauguugguaccccauggaaauccggccucgcaaaacccacgagagccaucugguuagauccugggugacagccugaggacuaguuauaagacugacuagcccgaugggccucccaacgggcccuccuccccuccuugcaccgagauuaauaaaaaaaaaaaaaaaaaaaaaaaaaaaaaaaaaaaaaaaaaaaaaaaaaaaaaaaaaaaaaaaaugcaucccccccccccccccccccccccccccccccaaaggcucuuuucagagccaccagaauu

SEQ ID NO: 2527 - RNA, 1330 nt, Artificial Sequence
  mRNA product Design i-3 comprising derived and/or modified sequence from YFV__NC_002031.1__SSIgE-NS1 (polyprotein: aa779-1130) (opt5)
gggagaaagcuuaccauggacuggaccuggauccuguuccucguggccgcugccacaagaguccacagcgaccagggcugcgcuaucaacuuugggaagagagagcuuaaauguggagauggcauuuucaucuuucgggacagcgaugacuggcugaauaaguacuccuauuaccccgaagauccugugaaacucgccucuauugugaaggcgagcuucgaggaagggaaaugcggacugaacuccgucgacucucuugagcacgaaauguggcgcagcagagcugaugagaucaaugccaucuuugaggaaaacgagguggacauuuccguugugguccaagauccgaagaauguguaucagcggggcacccaucccuucagccgcaucagagacggccugcaguacggguggaagacauggggcaaaaaccucguguuuucuccuggacggaagaauggguccuucauuaucgauggaaaaagccgcaaggaaugucccuuuucuaacagaguguggaacuccuuccagauugaggaguuuggcacgggggucuucaccacacggguguauauggacgccguguuugaauacaccaucgauugcgacggaagcauucugggcgcugccgucaauggcaaaaagucugcucacggguccccuacauucuggaugggaagccaugagguuaauggcaccuggaugauccacacacuggaagcccucgacuauaaggagugugaauggccccugacccauacgaucgggaccuccguggaggagucugaaauguucaugccucgcagcauuggaggcccgguguccagccacaaccacauccccggguacaaaguccaaacaaauggaccuuggaugcagguuccccuugagguuaagagagaagcgugcccuggcaccucugugauuaucgauggcaacugugacgggcggggaaaauccacacgcagcaccacggauucuggcaaggucauucccgaguggugcuguagaagcugcacaaugccgccuguguccuuucaugggucugacggauguugguaccccauggaaauccggccucgcaaaacccacgagagccaucugguuagauccugggugacagccugaggacuaguuauaagacugacuagcccgaugggccucccaacgggcccuccuccccuccuugcaccgagauuaauaaaaaaaaaaaaaaaaaaaaaaaaaaaaaaaaaaaaaaaaaaaaaaaaaaaaaaaaaaaaaaaaugcaucccccccccccccccccccccccccccccccaaaggcucuuuucagagccaccagaauu

SEQ ID NO: 2528 - RNA, 1480 nt, Artificial Sequence
  mRNA product Design i-3 comprising derived and/or modified sequence from YFV__NC_002031.1__eSS-NS1-Y (polyprotein: aa758-1177) (opt6)
gggagaaagcuuaccaugucaaugaguaugauauuaguagggguaauaaugauguuccuuagcuuaggaguaggagcagaucaaggaugugcaauaaauuuuggaaaaagagaacuaaaaugcggagacgguauauuuauauuuagagauagugaugauuggcuaaauaaauauaguuacuauccagaagauccaguuaaauuagccucaauaguaaaagcuagcuuugaagaaggaaaauguggacuaaauucaguagacagucuagaacacgaaauguggagaucaagggcagaugaaauaaaugcaaucuuugaagaaaaugaaguggauauaucagugguaguacaagauccaaaaaauguguaccaaagaggaacacauccauuuaguaggauaagagauggauuacaauauggauggaaaacauggggaaaaaauuuaguauuuaguccaggaagaaaaaauggaucauuuauaauagaugggaaaagccgaaaagaauguccauuuucaaacagaguauggaacucauuucaaauugaagaauuuggaacaggaguauuuacaacaagaguauauauggaugcaguauuugaauacaccauagauugugauggaaguauauuaggagcagcaguaaaugggaaaaaaagcgcucacggaaguccaacguuuuggaugggaucacacgagguaaauggcacguggaugauacauacuuuagaagcauuagauuacaaagaaugugaauggccauuaacucauacaauagguacaagcguagaagaaagugagauguuuaugccacguucaaucggggggccaguaucaagucauaaccauauaccaggauauaaaguacaaacgaauggaccuuggaugcaaguaccacuagaaguaaaacgagaagcaugcccaggaacgucaguaauaauagauggaaauugugauggcagggguaaaagcacaagaucaacaacagauucaggaaaaguaauaccugaaugguguuguagaaguuguacaaugccaccaguaucauuccauggaagugauggaugcugguauccaauggaaauuagaccaagaaaaacucaugaaagucauuuaguaagaucuuggguaacugcaggagaaauacaugcaguaccauuugguuuaguaaguaugaugauagcaauggaaguaguucuaagaaaaaggcaagggccuaaacaaaugcuagugggaggaguaguauugcuaggugcaauguuaguaggccaaguaaccugaggacuaguuauaagacugacuagcccgaugggccucccaacgggcccuccuccccuccuugcaccgagauuaauaaaaaaaaaaaaaaaaaaaaaaaaaaaaaaaaaaaaaaaaaaaaaaaaaaaaaaaaaaaaaaaaugcaucccccccccccccccccccccccccccccccaaaggcucuuuucagagccaccagaauu

SEQ ID NO: 2529 - RNA, 1339 nt, Artificial Sequence
  mRNA product Design i-3 comprising derived and/or modified sequence from YFV__NC_002031.1__eSS-NS1 (polyprotein: aa758-1130) (opt6)
gggagaaagcuuaccaugucaaugaguaugauauuaguagggguaauaaugauguuccuuagcuuaggaguaggagcagaucaaggaugugcaauaaauuuuggaaaaagagaacuaaaaugcggagacgguauauuuauauuuagagauagugaugauuggcuaaauaaauauaguuacuauccagaagauccaguuaaauuagccucaauaguaaaagcuagcuuugaagaaggaaaauguggacuaaauucaguagacagucuagaacacgaaauguggagaucaagggcagaugaaauaaaugcaaucuuugaagaaaaugaaguggauauaucagugguaguacaagauccaaaaaauguguaccaaagaggaacacauccauuuaguaggauaagagauggauuacaauauggauggaaaacauggggaaaaaauuuaguauuuaguccaggaagaaaaaauggaucauuuauaauagaugggaaaagccgaaaagaauguccauuuucaaacagaguauggaacucauuucaaauugaagaauuuggaacaggaguauuuacaacaagaguauauauggaugcaguauuugaauacaccauagauugugauggaaguauauuaggagcagcaguaaaugggaaaaaaagcgcucacggaaguccaacguuuuggaugggaucacacgagguaaauggcacguggaugauacauacuuuagaagcauuagauuacaaagaaugugaauggccauuaacucauacaauagguacaagcguagaagaaagugagauguuuaugccacguucaaucggggggccaguaucaagucauaaccauauaccaggauauaaaguacaaacgaauggaccuuggaugcaaguaccacuagaaguaaaacgagaagcaugcccaggaacgucaguaauaauagauggaaauugugauggcagggguaaaagcacaagaucaacaacagauucaggaaaaguaauaccugaaugguguuguagaaguuguacaaugccaccaguaucauuccauggaagugauggaugcugguauccaauggaaauuagaccaagaaaaacucaugaaagucauuuaguaagaucuuggguaacugcaugaggacuaguuauaagacugacuagcccgaugggccucccaacgggcccuccuccccuccuugcaccgagauuaauaaaaaaaaaaaaaaaaaaaaaaaaaaaaaaaaaaaaaaaaaaaaaaaaaaaaaaaaaaaaaaaaugcaucccccccccccccccccccccccccccccccaaaggcucuuuucagagccaccagaauu

SEQ ID NO: 2530 - RNA, 1330 nt, Artificial Sequence
  mRNA product Design i-3 comprising derived and/or modified sequence from YFV__NC_002031.1__SSIgE-NS1 (polyprotein: aa779-1130) (opt6)
gggagaaagcuuaccauggacuggacauggauauuauuuuuaguagcagcagcaacaagaguacauucagaucaaggaugugcaauaaauuuuggaaaaagagaacuaaaaugcggagacgguauauuuauauuuagagauagugaugauuggcuaaauaaauauaguuacuauccagaagauccaguuaaauuagccucaauaguaaaagcuagcuuugaagaaggaaaauguggacuaaauucaguagacagucuagaacacgaaauguggagaucaagggcagaugaaauaaaugcaaucuuugaagaaaaugaaguggauauaucagugguaguacaagauccaaaaaauguguaccaaagaggaacacauccauuuaguaggauaagagauggauuacaauauggauggaaaacauggggaaaaaauuuaguauuuaguccaggaagaaaaaauggaucauuuauaauagaugggaaaagccgaaaagaauguccauuuucaaacagaguauggaacucauuucaaauugaagaauuuggaacaggaguauuuacaacaagaguauauauggaugcaguauuugaauacaccauagauugugauggaaguauauuaggagcagcaguaaaugggaaaaaaagcgcucacggaaguccaacguuuuggaugggaucacacgagguaaauggcacguggaugauacauacuuuagaagcauuagauuacaaagaaugugaauggccauuaacucauacaauagguacaagcguagaagaaagugagauguuuaugccacguucaaucggggggccaguaucaagucauaaccauauaccaggauauaaaguacaaacgaauggaccuuggaugcaaguaccacuagaaguaaaacgagaagcaugcccaggaacgucaguaauaauagauggaaauugugauggcagggguaaaagcacaagaucaacaacagauucaggaaaaguaauaccugaaugguguuguagaaguuguacaaugccaccaguaucauuccauggaagugauggaugcugguauccaauggaaauuagaccaagaaaaacucaugaaagucauuuaguaagaucuuggguaacugcaugaggacuaguuauaagacugacuagcccgaugggccucccaacgggcccuccuccccuccuugcaccgagauuaauaaaaaaaaaaaaaaaaaaaaaaaaaaaaaaaaaaaaaaaaaaaaaaaaaaaaaaaaaaaaaaaaugcaucccccccccccccccccccccccccccccccaaaggcucuuuucagagccaccagaauu

SEQ ID NO: 2531 - RNA, 1480 nt, Artificial Sequence
  mRNA product Design i-3 comprising derived and/or modified sequence from YFV__NC_002031.1__eSS-NS1-Y (polyprotein: aa758-1177) (opt11)
gggagaaagcuuaccaugagcaugagcaugaucuugguaggggucauaaugauguucuugagccuagggguaggcgcagaccagggaugcgcgauaaacuucggcaaacgcgaacucaaaugcggggacggaaucuucaucuuucgcgacagugacgacuggcuaaacaaguacaguuacuacccggaagaccccguaaaacuagccucaauaguaaaagcgagcuucgaagaaggaaagugcgggcuaaacagcguggacucccuagagcacgagauguggaggucgagagcggacgagaucaacgccauauucgaagaaaaugaaguagacauaagcguagucguacaagaucccaaaaacguguaccagcgcggaacccaccccuucagcaggaucagagacgggcuacaauacggauggaagacauggggcaaaaaccuggucuucagcccgggcaggaaaaacggaucguucaucaucgauggcaaaagccgaaaggagugcccguucucaaacaggguauggaacucguuccagaucgaagaguucggcacaggcgucuucacgacaagagucuacauggacgcaguguucgaauacacaaucgacugcgacggcuccauacugggcgcagccgugaacgggaaaaagagcgcacacggaagcccgaccuuuuggauggguucgcacgaggugaacggaacauggaugauacacaccuuagaagcacucgauuacaaagaaugcgaauggcccuuaacccacaccaucgguacguccguagaagaaagcgaaauguucaugccgcgcucaaucggcggcccagucucgagccacaaccacaucccgggcuauaaaguacaaacaaacgggccauggaugcagguaccccucgaggucaagcgcgaagccugccccggaaccucggucaucaucgacggcaacugcgacggcaggggaaaaagcacgcgcucaaccacggacucgggaaagguaauaccagaguggugcugcaggagcugcaccaugccaccgguaucguuccacggcucagacggaugcugguacccgauggaaaucagacccagaaaaacgcacgagagccaccucguacgcucauggguaaccgcaggcgagauccacgccgugccauuuggacuggucucaaugaugauagcgauggaggucgugcucaggaagaggcaagggcccaagcaaaugcucguaggaggaguaguacuccugggcgcaaugcuggucggacaggugaccugaggacuaguuauaagacugacuagcccgaugggccucccaacgggcccuccuccccuccuugcaccgagauuaauaaaaaaaaaaaaaaaaaaaaaaaaaaaaaaaaaaaaaaaaaaaaaaaaaaaaaaaaaaaaaaaaugcaucccccccccccccccccccccccccccccccaaaggcucuuuucagagccaccagaauu

SEQ ID NO: 2532 - RNA, 1339 nt, Artificial Sequence
  mRNA product Design i-3 comprising derived and/or modified sequence from YFV__NC_002031.1__eSS-NS1 (polyprotein: aa758-1130) (opt11)
gggagaaagcuuaccaugagcaugagcaugaucuugguaggggucauaaugauguucuugagccuagggguaggcgcagaccagggaugcgcgauaaacuucggcaaacgcgaacucaaaugcggggacggaaucuucaucuuucgcgacagugacgacuggcuaaacaaguacaguuacuacccggaagaccccguaaaacuagccucaauaguaaaagcgagcuucgaagaaggaaagugcgggcuaaacagcguggacucccuagagcacgagauguggaggucgagagcggacgagaucaacgccauauucgaagaaaaugaaguagacauaagcguagucguacaagaucccaaaaacguguaccagcgcggaacccaccccuucagcaggaucagagacgggcuacaauacggauggaagacauggggcaaaaaccuggucuucagcccgggcaggaaaaacggaucguucaucaucgauggcaaaagccgaaaggagugcccguucucaaacaggguauggaacucguuccagaucgaagaguucggcacaggcgucuucacgacaagagucuacauggacgcaguguucgaauacacaaucgacugcgacggcuccauacugggcgcagccgugaacgggaaaaagagcgcacacggaagcccgaccuuuuggauggguucgcacgaggugaacggaacauggaugauacacaccuuagaagcacucgauuacaaagaaugcgaauggcccuuaacccacaccaucgguacguccguagaagaaagcgaaauguucaugccgcgcucaaucggcggcccagucucgagccacaaccacaucccgggcuauaaaguacaaacaaacgggccauggaugcagguaccccucgaggucaagcgcgaagccugccccggaaccucggucaucaucgacggcaacugcgacggcaggggaaaaagcacgcgcucaaccacggacucgggaaagguaauaccagaguggugcugcaggagcugcaccaugccaccgguaucguuccacggcucagacggaugcugguacccgauggaaaucagacccagaaaaacgcacgagagccaccucguacgcucauggguaaccgcaugaggacuaguuauaagacugacuagcccgaugggccucccaacgggcccuccuccccuccuugcaccgagauuaauaaaaaaaaaaaaaaaaaaaaaaaaaaaaaaaaaaaaaaaaaaaaaaaaaaaaaaaaaaaaaaaaugcaucccccccccccccccccccccccccccccccaaaggcucuuuucagagccaccagaauu

SEQ ID NO: 2533 - RNA, 1330 nt, Artificial Sequence
  mRNA product Design i-3 comprising derived and/or modified sequence from YFV__NC_002031.1__SSIgE-NS1 (polyprotein: aa779-1130) (opt11)
gggagaaagcuuaccauggauuggacguggauacucuuucucguggccgcggccacgcgcgugcacucggaccagggaugcgcgauaaacuucggcaaacgcgaacucaaaugcggggacggaaucuucaucuuucgcgacagugacgacuggcuaaacaaguacaguuacuacccggaagaccccguaaaacuagccucaauaguaaaagcgagcuucgaagaaggaaagugcgggcuaaacagcguggacucccuagagcacgagauguggaggucgagagcggacgagaucaacgccauauucgaagaaaaugaaguagacauaagcguagucguacaagaucccaaaaacguguaccagcgcggaacccaccccuucagcaggaucagagacgggcuacaauacggauggaagacauggggcaaaaaccuggucuucagcccgggcaggaaaaacggaucguucaucaucgauggcaaaagccgaaaggagugcccguucucaaacaggguauggaacucguuccagaucgaagaguucggcacaggcgucuucacgacaagagucuacauggacgcaguguucgaauacacaaucgacugcgacggcuccauacugggcgcagccgugaacgggaaaaagagcgcacacggaagcccgaccuuuuggauggguucgcacgaggugaacggaacauggaugauacacaccuuagaagcacucgauuacaaagaaugcgaauggcccuuaacccacaccaucgguacguccguagaagaaagcgaaauguucaugccgcgcucaaucggcggcccagucucgagccacaaccacaucccgggcuauaaaguacaaacaaacgggccauggaugcagguaccccucgaggucaagcgcgaagccugccccggaaccucggucaucaucgacggcaacugcgacggcaggggaaaaagcacgcgcucaaccacggacucgggaaagguaauaccagaguggugcugcaggagcugcaccaugccaccgguaucguuccacggcucagacggaugcugguacccgauggaaaucagacccagaaaaacgcacgagagccaccucguacgcucauggguaaccgcaugaggacuaguuauaagacugacuagcccgaugggccucccaacgggcccuccuccccuccuugcaccgagauuaauaaaaaaaaaaaaaaaaaaaaaaaaaaaaaaaaaaaaaaaaaaaaaaaaaaaaaaaaaaaaaaaaugcaucccccccccccccccccccccccccccccccaaaggcucuuuucagagccaccagaauu

SEQ ID NO: 2534 - RNA, 1585 nt, Artificial Sequence
  mRNA product Design a-4 comprising derived and/or modified sequence from YFV__NC_002031.1__eSS-NS1-Y (polyprotein: aa758-1177) (wt)
gggagacuccugucgggcggaaguaggaggaguagaguuuaaaaacaguacucuuuuuccgguucgggacguaguugaagcaacgacaagccggauaaccgcucuugagacaggaagcuuaccauguccaugagcaugaucuugguaggagugaucaugauguuuuugucucuaggaguuggggcggaucaaggaugcgccaucaacuuuggcaagagagagcucaagugcggagaugguaucuucauauuuagagacucugaugacuggcugaacaaguacucauacuauccagaagauccugugaagcuugcaucaauagugaaagccucuuuugaagaagggaaguguggccuaaauucaguugacucccuugagcaugagauguggagaagcagggcagaugagaucaaugccauuuuugaggaaaacgagguggacauuucuguugucgugcaggauccaaagaauguuuaccagagaggaacucauccauuuuccagaauucgggauggucugcaguaugguuggaagacuugggguaagaaccuuguguucuccccagggaggaagaauggaagcuucaucauagauggaaaguccaggaaagaaugcccguuuucaaaccgggucuggaauucuuuccagauagaggaguuugggacgggaguguucaccacacgcguguacauggacgcagucuuugaauacaccauagacugcgauggaucuaucuugggugcagcggugaacggaaaaaagagugcccauggcucuccaacauuuuggaugggaagucaugaaguaaaugggacauggaugauccacaccuuggaggcauuagauuacaaggagugugaguggccacugacacauacgauuggaacaucaguugaagagagugaaauguucaugccgagaucaaucggaggcccaguuagcucucacaaucauaucccuggauacaagguucagacgaacggaccuuggaugcagguaccacuagaagugaagagagaagcuugcccagggacuagcgugaucauugauggcaacugugauggacggggaaaaucaaccagauccaccacggauagcgggaaaguuauuccugaaugguguugccgcuccugcacaaugccgccugugagcuuccaugguagugauggguguugguaucccauggaaauuaggccaaggaaaacgcaugaaagccaucuggugcgcuccuggguuacagcuggagaaauacaugcugucccuuuugguuuggugagcaugaugauagcaauggaagugguccuaaggaaaagacagggaccaaagcaaauguugguuggaggaguagugcucuugggagcaaugcuggucgggcaaguaacuugaggacuagucccuguucccagagcccacuuuuuuuucuuuuuuugaaauaaaauagccugucuuucagaucuaaaaaaaaaaaaaaaaaaaaaaaaaaaaaaaaaaaaaaaaaaaaaaaaaaaaaaaaaaaaaaaaugcaucccccccccccccccccccccccccccccccaaaggcucuuuucagagccaccagaauu

SEQ ID NO: 2535 - RNA, 1444 nt, Artificial Sequence
  mRNA product Design a-4 comprising derived and/or modified sequence from YFV__NC_002031.1__eSS-NS1 (polyprotein: aa758-1130) (wt)
gggagacuccugucgggcggaaguaggaggaguagaguuuaaaaacaguacucuuuuuccgguucgggacguaguugaagcaacgacaagccggauaaccgcucuugagacaggaagcuuaccauguccaugagcaugaucuugguaggagugaucaugauguuuuugucucuaggaguuggggcggaucaaggaugcgccaucaacuuuggcaagagagagcucaagugcggagaugguaucuucauauuuagagacucugaugacuggcugaacaaguacucauacuauccagaagauccugugaagcuugcaucaauagugaaagccucuuuugaagaagggaaguguggccuaaauucaguugacucccuugagcaugagauguggagaagcagggcagaugagaucaaugccauuuuugaggaaaacgagguggacauuucuguugucgugcaggauccaaagaauguuuaccagagaggaacucauccauuuuccagaauucgggauggucugcaguaugguuggaagacuugggguaagaaccuuguguucuccccagggaggaagaauggaagcuucaucauagauggaaaguccaggaaagaaugcccguuuucaaaccgggucuggaauucuuuccagauagaggaguuugggacgggaguguucaccacacgcguguacauggacgcagucuuugaauacaccauagacugcgauggaucuaucuugggugcagcggugaacggaaaaaagagugcccauggcucuccaacauuuuggaugggaagucaugaaguaaaugggacauggaugauccacaccuuggaggcauuagauuacaaggagugugaguggccacugacacauacgauuggaacaucaguugaagagagugaaauguucaugccgagaucaaucggaggcccaguuagcucucacaaucauaucccuggauacaagguucagacgaacggaccuuggaugcagguaccacuagaagugaagagagaagcuugcccagggacuagcgugaucauugauggcaacugugauggacggggaaaaucaaccagauccaccacggauagcgggaaaguuauuccugaaugguguugccgcuccugcacaaugccgccugugagcuuccaugguagugauggguguugguaucccauggaaauuaggccaaggaaaacgcaugaaagccaucuggugcgcuccuggguuacagcuugaggacuagucccuguucccagagcccacuuuuuuuucuuuuuuugaaauaaaauagccugucuuucagaucuaaaaaaaaaaaaaaaaaaaaaaaaaaaaaaaaaaaaaaaaaaaaaaaaaaaaaaaaaaaaaaaaugcaucccccccccccccccccccccccccccccccaaaggcucuuuucagagccaccagaauu

SEQ ID NO: 2536 - RNA, 1435 nt, Artificial Sequence
  mRNA product Design a-4 comprising derived and/or modified sequence from YFV__NC_002031.1__SSIgE-NS1 (polyprotein: aa779-1130) (wt)
gggagacuccugucgggcggaaguaggaggaguagaguuuaaaaacaguacucuuuuuccgguucgggacguaguugaagcaacgacaagccggauaaccgcucuugagacaggaagcuuaccauggacuggaccuggauccuguuccucguggccgccgcgacccgcguccacagcgaucaaggaugcgccaucaacuuuggcaagagagagcucaagugcggagaugguaucuucauauuuagagacucugaugacuggcugaacaaguacucauacuauccagaagauccugugaagcuugcaucaauagugaaagccucuuuugaagaagggaaguguggccuaaauucaguugacucccuugagcaugagauguggagaagcagggcagaugagaucaaugccauuuuugaggaaaacgagguggacauuucuguugucgugcaggauccaaagaauguuuaccagagaggaacucauccauuuuccagaauucgggauggucugcaguaugguuggaagacuugggguaagaaccuuguguucuccccagggaggaagaauggaagcuucaucauagauggaaaguccaggaaagaaugcccguuuucaaaccgggucuggaauucuuuccagauagaggaguuugggacgggaguguucaccacacgcguguacauggacgcagucuuugaauacaccauagacugcgauggaucuaucuugggugcagcggugaacggaaaaaagagugcccauggcucuccaacauuuuggaugggaagucaugaaguaaaugggacauggaugauccacaccuuggaggcauuagauuacaaggagugugaguggccacugacacauacgauuggaacaucaguugaagagagugaaauguucaugccgagaucaaucggaggcccaguuagcucucacaaucauaucccuggauacaagguucagacgaacggaccuuggaugcagguaccacuagaagugaagagagaagcuugcccagggacuagcgugaucauugauggcaacugugauggacggggaaaaucaaccagauccaccacggauagcgggaaaguuauuccugaaugguguugccgcuccugcacaaugccgccugugagcuuccaugguagugauggguguugguaucccauggaaauuaggccaaggaaaacgcaugaaagccaucuggugcgcuccuggguuacagcuugaggacuagucccuguucccagagcccacuuuuuuuucuuuuuuugaaauaaaauagccugucuuucagaucuaaaaaaaaaaaaaaaaaaaaaaaaaaaaaaaaaaaaaaaaaaaaaaaaaaaaaaaaaaaaaaaaugcaucccccccccccccccccccccccccccccccaaaggcucuuuucagagccaccagaauu

SEQ ID NO: 2537 - RNA, 1585 nt, Artificial Sequence
  mRNA product Design a-4 comprising derived and/or modified sequence from YFV__NC_002031.1__eSS-NS1-Y (polyprotein: aa758-1177) (opt1)
gggagacuccugucgggcggaaguaggaggaguagaguuuaaaaacaguacucuuuuuccgguucgggacguaguugaagcaacgacaagccggauaaccgcucuugagacaggaagcuuaccaugagcauguccaugauccuggugggcgucaucaugauguuccucagccugggggugggcgccgaccaggggugcgccaucaacuucggcaagcgcgagcugaagugcggggacggcaucuucaucuuccgggacuccgacgacuggcucaacaaguacagcuacuaccccgaggacccggugaagcuggcguccaucgucaaggccagcuucgaggagggcaagugcgggcugaacuccguggacagccucgagcacgagauguggcgcucccgggccgacgagaucaacgccaucuucgaggagaacgagguggacaucagcgucguggugcaggaccccaagaacgucuaccagcgcggcacccaccccuucucccggauccgcgacgggcugcaguacggcuggaagaccugggggaagaaccugguguucagccccggccggaagaacggcuccuucaucaucgacggcaagagccgcaaggagugcccguucuccaaccggguguggaacagcuuccagaucgaggaguucgggacgggggucuucaccacccgcguguacauggacgccguguucgaguacaccaucgacugcgacggcuccauccucggcgcggccgucaacgggaagaaguccgcccacggcagccccacguucuggauggggagccacgaggugaacggcaccuggaugauccacacccuggaggcccuggacuacaaggagugcgaguggccccucacccacacgaucgggaccagcguggaggaguccgagauguucaugccccggagcaucggcggcccggucuccagccacaaccacauccccggguacaaggugcagaccaacggccccuggaugcaggucccccuggaggugaagcgcgaggcgugcccggggaccuccgugaucaucgacggcaacugcgacgggcggggcaagagcacgcgcuccaccaccgacagcggcaaggugauccccgaguggugcugccgguccugcaccaugccgcccgucagcuuccacggguccgacggcugcugguaccccauggagauccgcccccggaagacgcacgagagccaccuggugcgcuccugggucaccgccggggagauccacgccgugcccuucggccucgugagcaugaugaucgccauggaggucgugcugcggaagcgccaggggcccaagcagaugcuggugggcggcgucgugcuccugggggccaugcuggugggccaggucaccugaggacuagucccuguucccagagcccacuuuuuuuucuuuuuuugaaauaaaauagccugucuuucagaucuaaaaaaaaaaaaaaaaaaaaaaaaaaaaaaaaaaaaaaaaaaaaaaaaaaaaaaaaaaaaaaaaugcaucccccccccccccccccccccccccccccccaaaggcucuuuucagagccaccagaauu

SEQ ID NO: 2538 - RNA, 1444 nt, Artificial Sequence
  mRNA product Design a-4 comprising derived and/or modified sequence from YFV__NC_002031.1__eSS-NS1 (polyprotein: aa758-1130) (opt1)
gggagacuccugucgggcggaaguaggaggaguagaguuuaaaaacaguacucuuuuuccgguucgggacguaguugaagcaacgacaagccggauaaccgcucuugagacaggaagcuuaccaugagcauguccaugauccuggugggcgucaucaugauguuccucagccugggggugggcgccgaccaggggugcgccaucaacuucggcaagcgcgagcugaagugcggggacggcaucuucaucuuccgggacuccgacgacuggcucaacaaguacagcuacuaccccgaggacccggugaagcuggcguccaucgucaaggccagcuucgaggagggcaagugcgggcugaacuccguggacagccucgagcacgagauguggcgcucccgggccgacgagaucaacgccaucuucgaggagaacgagguggacaucagcgucguggugcaggaccccaagaacgucuaccagcgcggcacccaccccuucucccggauccgcgacgggcugcaguacggcuggaagaccugggggaagaaccugguguucagccccggccggaagaacggcuccuucaucaucgacggcaagagccgcaaggagugcccguucuccaaccggguguggaacagcuuccagaucgaggaguucgggacgggggucuucaccacccgcguguacauggacgccguguucgaguacaccaucgacugcgacggcuccauccucggcgcggccgucaacgggaagaaguccgcccacggcagccccacguucuggauggggagccacgaggugaacggcaccuggaugauccacacccuggaggcccuggacuacaaggagugcgaguggccccucacccacacgaucgggaccagcguggaggaguccgagauguucaugccccggagcaucggcggcccggucuccagccacaaccacauccccggguacaaggugcagaccaacggccccuggaugcaggucccccuggaggugaagcgcgaggcgugcccggggaccuccgugaucaucgacggcaacugcgacgggcggggcaagagcacgcgcuccaccaccgacagcggcaaggugauccccgaguggugcugccgguccugcaccaugccgcccgucagcuuccacggguccgacggcugcugguaccccauggagauccgcccccggaagacgcacgagagccaccuggugcgcuccugggucaccgccugaggacuagucccuguucccagagcccacuuuuuuuucuuuuuuugaaauaaaauagccugucuuucagaucuaaaaaaaaaaaaaaaaaaaaaaaaaaaaaaaaaaaaaaaaaaaaaaaaaaaaaaaaaaaaaaaaugcaucccccccccccccccccccccccccccccccaaaggcucuuuucagagccaccagaauu

SEQ ID NO: 2539 - RNA, 1435 nt, Artificial Sequence
  mRNA product Design a-4 comprising derived and/or modified sequence from YFV__NC_002031.1__SSIgE-NS1 (polyprotein: aa779-1130) (opt1)
gggagacuccugucgggcggaaguaggaggaguagaguuuaaaaacaguacucuuuuuccgguucgggacguaguugaagcaacgacaagccggauaaccgcucuugagacaggaagcuuaccauggacuggaccuggauccuguuccucguggccgccgcgacccgcguccacagcgaccaggggugcgccaucaacuucggcaagcgcgagcugaagugcggggacggcaucuucaucuuccgggacuccgacgacuggcucaacaaguacagcuacuaccccgaggacccggugaagcuggcguccaucgucaaggccagcuucgaggagggcaagugcgggcugaacuccguggacagccucgagcacgagauguggcgcucccgggccgacgagaucaacgccaucuucgaggagaacgagguggacaucagcgucguggugcaggaccccaagaacgucuaccagcgcggcacccaccccuucucccggauccgcgacgggcugcaguacggcuggaagaccugggggaagaaccugguguucagccccggccggaagaacggcuccuucaucaucgacggcaagagccgcaaggagugcccguucuccaaccggguguggaacagcuuccagaucgaggaguucgggacgggggucuucaccacccgcguguacauggacgccguguucgaguacaccaucgacugcgacggcuccauccucggcgcggccgucaacgggaagaaguccgcccacggcagccccacguucuggauggggagccacgaggugaacggcaccuggaugauccacacccuggaggcccuggacuacaaggagugcgaguggccccucacccacacgaucgggaccagcguggaggaguccgagauguucaugccccggagcaucggcggcccggucuccagccacaaccacauccccggguacaaggugcagaccaacggccccuggaugcaggucccccuggaggugaagcgcgaggcgugcccggggaccuccgugaucaucgacggcaacugcgacgggcggggcaagagcacgcgcuccaccaccgacagcggcaaggugauccccgaguggugcugccgguccugcaccaugccgcccgucagcuuccacggguccgacggcugcugguaccccauggagauccgcccccggaagacgcacgagagccaccuggugcgcuccugggucaccgccugaggacuagucccuguucccagagcccacuuuuuuuucuuuuuuugaaauaaaauagccugucuuucagaucuaaaaaaaaaaaaaaaaaaaaaaaaaaaaaaaaaaaaaaaaaaaaaaaaaaaaaaaaaaaaaaaaugcaucccccccccccccccccccccccccccccccaaaggcucuuuucagagccaccagaauu

SEQ ID NO: 2540 - RNA, 1585 nt, Artificial Sequence
  mRNA product Design a-4 comprising derived and/or modified sequence from YFV__NC_002031.1__eSS-NS1-Y (polyprotein: aa758-1177) (opt2)
gggagacuccugucgggcggaaguaggaggaguagaguuuaaaaacaguacucuuuuuccgguucgggacguaguugaagcaacgacaagccggauaaccgcucuugagacaggaagcuuaccauguccauguccaugauccucgucggcgucaucaugauguuccucucccucggcgucggcgccgaccagggcugcgccaucaacuucggcaagcgcgagcucaagugcggcgacggcaucuucaucuuccgcgacuccgacgacuggcucaacaaguacuccuacuaccccgaggaccccgucaagcucgccuccaucgucaaggccuccuucgaggagggcaagugcggccucaacuccgucgacucccucgagcacgagauguggcgcucccgcgccgacgagaucaacgccaucuucgaggagaacgaggucgacaucuccgucgucguccaggaccccaagaacgucuaccagcgcggcacccaccccuucucccgcauccgcgacggccuccaguacggcuggaagaccuggggcaagaaccucgucuucucccccggccgcaagaacggcuccuucaucaucgacggcaagucccgcaaggagugccccuucuccaaccgcgucuggaacuccuuccagaucgaggaguucggcaccggcgucuucaccacccgcgucuacauggacgccgucuucgaguacaccaucgacugcgacggcuccauccucggcgccgccgucaacggcaagaaguccgcccacggcucccccaccuucuggaugggcucccacgaggucaacggcaccuggaugauccacacccucgaggcccucgacuacaaggagugcgaguggccccucacccacaccaucggcaccuccgucgaggaguccgagauguucaugccccgcuccaucggcggccccgucuccucccacaaccacauccccggcuacaagguccagaccaacggccccuggaugcaggucccccucgaggucaagcgcgaggccugccccggcaccuccgucaucaucgacggcaacugcgacggccgcggcaaguccacccgcuccaccaccgacuccggcaaggucauccccgaguggugcugccgcuccugcaccaugccccccgucuccuuccacggcuccgacggcugcugguaccccauggagauccgcccccgcaagacccacgagucccaccucguccgcuccugggucaccgccggcgagauccacgccguccccuucggccucgucuccaugaugaucgccauggaggucguccuccgcaagcgccagggccccaagcagaugcucgucggcggcgucguccuccucggcgccaugcucgucggccaggucaccugaggacuagucccuguucccagagcccacuuuuuuuucuuuuuuugaaauaaaauagccugucuuucagaucuaaaaaaaaaaaaaaaaaaaaaaaaaaaaaaaaaaaaaaaaaaaaaaaaaaaaaaaaaaaaaaaaugcaucccccccccccccccccccccccccccccccaaaggcucuuuucagagccaccagaauu

SEQ ID NO: 2541 - RNA, 1444 nt, Artificial Sequence
  mRNA product Design a-4 comprising derived and/or modified sequence from YFV__NC_002031.1__eSS-NS1 (polyprotein: aa758-1130) (opt2)
gggagacuccugucgggcggaaguaggaggaguagaguuuaaaaacaguacucuuuuuccgguucgggacguaguugaagcaacgacaagccggauaaccgcucuugagacaggaagcuuaccauguccauguccaugauccucgucggcgucaucaugauguuccucucccucggcgucggcgccgaccagggcugcgccaucaacuucggcaagcgcgagcucaagugcggcgacggcaucuucaucuuccgcgacuccgacgacuggcucaacaaguacuccuacuaccccgaggaccccgucaagcucgccuccaucgucaaggccuccuucgaggagggcaagugcggccucaacuccgucgacucccucgagcacgagauguggcgcucccgcgccgacgagaucaacgccaucuucgaggagaacgaggucgacaucuccgucgucguccaggaccccaagaacgucuaccagcgcggcacccaccccuucucccgcauccgcgacggccuccaguacggcuggaagaccuggggcaagaaccucgucuucucccccggccgcaagaacggcuccuucaucaucgacggcaagucccgcaaggagugccccuucuccaaccgcgucuggaacuccuuccagaucgaggaguucggcaccggcgucuucaccacccgcgucuacauggacgccgucuucgaguacaccaucgacugcgacggcuccauccucggcgccgccgucaacggcaagaaguccgcccacggcucccccaccuucuggaugggcucccacgaggucaacggcaccuggaugauccacacccucgaggcccucgacuacaaggagugcgaguggccccucacccacaccaucggcaccuccgucgaggaguccgagauguucaugccccgcuccaucggcggccccgucuccucccacaaccacauccccggcuacaagguccagaccaacggccccuggaugcaggucccccucgaggucaagcgcgaggccugccccggcaccuccgucaucaucgacggcaacugcgacggccgcggcaaguccacccgcuccaccaccgacuccggcaaggucauccccgaguggugcugccgcuccugcaccaugccccccgucuccuuccacggcuccgacggcugcugguaccccauggagauccgcccccgcaagacccacgagucccaccucguccgcuccugggucaccgccugaggacuagucccuguucccagagcccacuuuuuuuucuuuuuuugaaauaaaauagccugucuuucagaucuaaaaaaaaaaaaaaaaaaaaaaaaaaaaaaaaaaaaaaaaaaaaaaaaaaaaaaaaaaaaaaaaugcaucccccccccccccccccccccccccccccccaaaggcucuuuucagagccaccagaauu

SEQ ID NO: 2542 - RNA, 1435 nt, Artificial Sequence
  mRNA product Design a-4 comprising derived and/or modified sequence from YFV__NC_002031.1__SSIgE-NS1 (polyprotein: aa779-1130) (opt2)
gggagacuccugucgggcggaaguaggaggaguagaguuuaaaaacaguacucuuuuuccgguucgggacguaguugaagcaacgacaagccggauaaccgcucuugagacaggaagcuuaccauggacuggaccuggauccucuuccucgucgccgccgccacccgcguccacuccgaccagggcugcgccaucaacuucggcaagcgcgagcucaagugcggcgacggcaucuucaucuuccgcgacuccgacgacuggcucaacaaguacuccuacuaccccgaggaccccgucaagcucgccuccaucgucaaggccuccuucgaggagggcaagugcggccucaacuccgucgacucccucgagcacgagauguggcgcucccgcgccgacgagaucaacgccaucuucgaggagaacgaggucgacaucuccgucgucguccaggaccccaagaacgucuaccagcgcggcacccaccccuucucccgcauccgcgacggccuccaguacggcuggaagaccuggggcaagaaccucgucuucucccccggccgcaagaacggcuccuucaucaucgacggcaagucccgcaaggagugccccuucuccaaccgcgucuggaacuccuuccagaucgaggaguucggcaccggcgucuucaccacccgcgucuacauggacgccgucuucgaguacaccaucgacugcgacggcuccauccucggcgccgccgucaacggcaagaaguccgcccacggcucccccaccuucuggaugggcucccacgaggucaacggcaccuggaugauccacacccucgaggcccucgacuacaaggagugcgaguggccccucacccacaccaucggcaccuccgucgaggaguccgagauguucaugccccgcuccaucggcggccccgucuccucccacaaccacauccccggcuacaagguccagaccaacggccccuggaugcaggucccccucgaggucaagcgcgaggccugccccggcaccuccgucaucaucgacggcaacugcgacggccgcggcaaguccacccgcuccaccaccgacuccggcaaggucauccccgaguggugcugccgcuccugcaccaugccccccgucuccuuccacggcuccgacggcugcugguaccccauggagauccgcccccgcaagacccacgagucccaccucguccgcuccugggucaccgccugaggacuagucccuguucccagagcccacuuuuuuuucuuuuuuugaaauaaaauagccugucuuucagaucuaaaaaaaaaaaaaaaaaaaaaaaaaaaaaaaaaaaaaaaaaaaaaaaaaaaaaaaaaaaaaaaaugcaucccccccccccccccccccccccccccccccaaaggcucuuuucagagccaccagaauu

SEQ ID NO: 2543 - RNA, 1585 nt, Artificial Sequence
  mRNA product Design a-4 comprising derived and/or modified sequence from YFV__NC_002031.1__eSS-NS1-Y (polyprotein: aa758-1177) (opt3)
gggagacuccugucgggcggaaguaggaggaguagaguuuaaaaacaguacucuuuuuccgguucgggacguaguugaagcaacgacaagccggauaaccgcucuugagacaggaagcuuaccaugagcauguccaugauccuggugggcgucauuaugauguuccucucucuugggguuggagccgaccaggguugcgcuauaaacuuuggcaagagagagcugaaauguggggauggaaucuucauuuuuagggacucagaugacugguugaauaaguacaguuauuaccccgaagauccugugaaauuagcaagcaucguaaaggccuccuucgaggaaggcaaaugcggucugaacucuguggacucgcuagagcacgaaauguggcggucacgcgcggaugagauuaaugcuaucuuugaggaaaacgaggucgacauaagcgugguugugcaagauccaaagaaugucuaucagcgagggacccauccguucagucguaucagagacggacuccaguacggcuggaagacauggggcaaaaaccugguguuuucccccgggaggaagaauggaucuuucauuaucgaugguaaaagccggaaggaauguccuuuuuccaaccgcguauggaacucauuccagauugaggaguuuggcacugggguuuucacgaccagaguguauauggacgccgucuuugaauacacaaucgauugcgacggaaguauacuuggcgcagccgugaaugguaaaaagagcgcucacgggucuccaacuuucuggaugggaucccaugaggugaauggcaccuggaugauucacacacuggaagcauuggacuauaaggagugugaauggccccucacccauacuaucggcacaucagucgaggagagcgaaauguucaugccuaggaguauugggggaccaguuucuucccacaaccacauccccgguuacaaagugcaaaccaauggcccuuggaugcagguaccacuggaggugaagcgggaagccugcccggggacgagcgucaucauugauggaaacugugacggccgcgguaaaucgacucgaucuaccacagauuccgggaaggugauacccgaguggugcuguagaucaugcacuaugccuccaguuaguuuucauggcagcgacggauguugguaccccauggaaaucaggccucggaaaacccacgagucccaucuggugcguucuugggucacagcuggcgagauucacgccgugccauucgggcucguaagcaugaugaucgcgauggaaguuguguuacgcaagagacagggacccaaacagaugcuggucgguggcgugguccuuuugggggcaaugcuggugggacaaguuaccugaggacuagucccuguucccagagcccacuuuuuuuucuuuuuuugaaauaaaauagccugucuuucagaucuaaaaaaaaaaaaaaaaaaaaaaaaaaaaaaaaaaaaaaaaaaaaaaaaaaaaaaaaaaaaaaaaugcaucccccccccccccccccccccccccccccccaaaggcucuuuucagagccaccagaauu

SEQ ID NO: 2544 - RNA, 1444 nt, Artificial Sequence
  mRNA product Design a-4 comprising derived and/or modified sequence from YFV__NC_002031.1__eSS-NS1 (polyprotein: aa758-1130) (opt3)
gggagacuccugucgggcggaaguaggaggaguagaguuuaaaaacaguacucuuuuuccgguucgggacguaguugaagcaacgacaagccggauaaccgcucuugagacaggaagcuuaccaugagcauguccaugauccuggugggcgucauuaugauguuccucucucuugggguuggagccgaccaggguugcgcuauaaacuuuggcaagagagagcugaaauguggggauggaaucuucauuuuuagggacucagaugacugguugaauaaguacaguuauuaccccgaagauccugugaaauuagcaagcaucguaaaggccuccuucgaggaaggcaaaugcggucugaacucuguggacucgcuagagcacgaaauguggcggucacgcgcggaugagauuaaugcuaucuuugaggaaaacgaggucgacauaagcgugguugugcaagauccaaagaaugucuaucagcgagggacccauccguucagucguaucagagacggacuccaguacggcuggaagacauggggcaaaaaccugguguuuucccccgggaggaagaauggaucuuucauuaucgaugguaaaagccggaaggaauguccuuuuuccaaccgcguauggaacucauuccagauugaggaguuuggcacugggguuuucacgaccagaguguauauggacgccgucuuugaauacacaaucgauugcgacggaaguauacuuggcgcagccgugaaugguaaaaagagcgcucacgggucuccaacuuucuggaugggaucccaugaggugaauggcaccuggaugauucacacacuggaagcauuggacuauaaggagugugaauggccccucacccauacuaucggcacaucagucgaggagagcgaaauguucaugccuaggaguauugggggaccaguuucuucccacaaccacauccccgguuacaaagugcaaaccaauggcccuuggaugcagguaccacuggaggugaagcgggaagccugcccggggacgagcgucaucauugauggaaacugugacggccgcgguaaaucgacucgaucuaccacagauuccgggaaggugauacccgaguggugcuguagaucaugcacuaugccuccaguuaguuuucauggcagcgacggauguugguaccccauggaaaucaggccucggaaaacccacgagucccaucuggugcguucuugggucacagcuugaggacuagucccuguucccagagcccacuuuuuuuucuuuuuuugaaauaaaauagccugucuuucagaucuaaaaaaaaaaaaaaaaaaaaaaaaaaaaaaaaaaaaaaaaaaaaaaaaaaaaaaaaaaaaaaaaugcaucccccccccccccccccccccccccccccccaaaggcucuuuucagagccaccagaauu

SEQ ID NO: 2545 - RNA, 1435 nt, Artificial Sequence
  mRNA product Design a-4 comprising derived and/or modified sequence from YFV__NC_002031.1__SSIgE-NS1 (polyprotein: aa779-1130) (opt3)
gggagacuccugucgggcggaaguaggaggaguagaguuuaaaaacaguacucuuuuuccgguucgggacguaguugaagcaacgacaagccggauaaccgcucuugagacaggaagcuuaccauggacuggaccuggauccuguuccucguggccgcugcaacaagaguccacagcgaccaggguugcgcuauaaacuuuggcaagagagagcugaaauguggggauggaaucuucauuuuuagggacucagaugacugguugaauaaguacaguuauuaccccgaagauccugugaaauuagcaagcaucguaaaggccuccuucgaggaaggcaaaugcggucugaacucuguggacucgcuagagcacgaaauguggcggucacgcgcggaugagauuaaugcuaucuuugaggaaaacgaggucgacauaagcgugguugugcaagauccaaagaaugucuaucagcgagggacccauccguucagucguaucagagacggacuccaguacggcuggaagacauggggcaaaaaccugguguuuucccccgggaggaagaauggaucuuucauuaucgaugguaaaagccggaaggaauguccuuuuuccaaccgcguauggaacucauuccagauugaggaguuuggcacugggguuuucacgaccagaguguauauggacgccgucuuugaauacacaaucgauugcgacggaaguauacuuggcgcagccgugaaugguaaaaagagcgcucacgggucuccaacuuucuggaugggaucccaugaggugaauggcaccuggaugauucacacacuggaagcauuggacuauaaggagugugaauggccccucacccauacuaucggcacaucagucgaggagagcgaaauguucaugccuaggaguauugggggaccaguuucuucccacaaccacauccccgguuacaaagugcaaaccaauggcccuuggaugcagguaccacuggaggugaagcgggaagccugcccggggacgagcgucaucauugauggaaacugugacggccgcgguaaaucgacucgaucuaccacagauuccgggaaggugauacccgaguggugcuguagaucaugcacuaugccuccaguuaguuuucauggcagcgacggauguugguaccccauggaaaucaggccucggaaaacccacgagucccaucuggugcguucuugggucacagcuugaggacuagucccuguucccagagcccacuuuuuuuucuuuuuuugaaauaaaauagccugucuuucagaucuaaaaaaaaaaaaaaaaaaaaaaaaaaaaaaaaaaaaaaaaaaaaaaaaaaaaaaaaaaaaaaaaugcaucccccccccccccccccccccccccccccccaaaggcucuuuucagagccaccagaauu

SEQ ID NO: 2546 - RNA, 1585 nt, Artificial Sequence
  mRNA product Design a-4 comprising derived and/or modified sequence from YFV__NC_002031.1__eSS-NS1-Y (polyprotein: aa758-1177) (opt4)
gggagacuccugucgggcggaaguaggaggaguagaguuuaaaaacaguacucuuuuuccgguucgggacguaguugaagcaacgacaagccggauaaccgcucuugagacaggaagcuuaccaugagcaugagcaugauccuggugggcgugaucaugauguuccugagccugggcgugggcgccgaccagggcugcgccaucaacuucggcaagagagagcugaagugcggcgacggcaucuucaucuucagagacagcgacgacuggcugaacaaguacagcuacuaccccgaggaccccgugaagcuggccagcaucgugaaggccagcuucgaggagggcaagugcggccugaacagcguggacagccuggagcacgagauguggagaagcagagccgacgagaucaacgccaucuucgaggagaacgagguggacaucagcgugguggugcaggaccccaagaacguguaccagagaggcacccaccccuucagcagaaucagagacggccugcaguacggcuggaagaccuggggcaagaaccugguguucagccccggcagaaagaacggcagcuucaucaucgacggcaagagcagaaaggagugccccuucagcaacagaguguggaacagcuuccagaucgaggaguucggcaccggcguguucaccaccagaguguacauggacgccguguucgaguacaccaucgacugcgacggcagcauccugggcgccgccgugaacggcaagaagagcgcccacggcagccccaccuucuggaugggcagccacgaggugaacggcaccuggaugauccacacccuggaggcccuggacuacaaggagugcgaguggccccugacccacaccaucggcaccagcguggaggagagcgagauguucaugcccagaagcaucggcggccccgugagcagccacaaccacauccccggcuacaaggugcagaccaacggccccuggaugcaggugccccuggaggugaagagagaggccugccccggcaccagcgugaucaucgacggcaacugcgacggcagaggcaagagcaccagaagcaccaccgacagcggcaaggugauccccgaguggugcugcagaagcugcaccaugccccccgugagcuuccacggcagcgacggcugcugguaccccauggagaucagacccagaaagacccacgagagccaccuggugagaagcugggugaccgccggcgagauccacgccgugcccuucggccuggugagcaugaugaucgccauggagguggugcugagaaagagacagggccccaagcagaugcuggugggcggcguggugcugcugggcgccaugcuggugggccaggugaccugaggacuagucccuguucccagagcccacuuuuuuuucuuuuuuugaaauaaaauagccugucuuucagaucuaaaaaaaaaaaaaaaaaaaaaaaaaaaaaaaaaaaaaaaaaaaaaaaaaaaaaaaaaaaaaaaaugcaucccccccccccccccccccccccccccccccaaaggcucuuuucagagccaccagaauu

SEQ ID NO: 2547 - RNA, 1444 nt, Artificial Sequence
  mRNA product Design a-4 comprising derived and/or modified sequence from YFV__NC_002031.1__eSS-NS1 (polyprotein: aa758-1130) (opt4)
gggagacuccugucgggcggaaguaggaggaguagaguuuaaaaacaguacucuuuuuccgguucgggacguaguugaagcaacgacaagccggauaaccgcucuugagacaggaagcuuaccaugagcaugagcaugauccuggugggcgugaucaugauguuccugagccugggcgugggcgccgaccagggcugcgccaucaacuucggcaagagagagcugaagugcggcgacggcaucuucaucuucagagacagcgacgacuggcugaacaaguacagcuacuaccccgaggaccccgugaagcuggccagcaucgugaaggccagcuucgaggagggcaagugcggccugaacagcguggacagccuggagcacgagauguggagaagcagagccgacgagaucaacgccaucuucgaggagaacgagguggacaucagcgugguggugcaggaccccaagaacguguaccagagaggcacccaccccuucagcagaaucagagacggccugcaguacggcuggaagaccuggggcaagaaccugguguucagccccggcagaaagaacggcagcuucaucaucgacggcaagagcagaaaggagugccccuucagcaacagaguguggaacagcuuccagaucgaggaguucggcaccggcguguucaccaccagaguguacauggacgccguguucgaguacaccaucgacugcgacggcagcauccugggcgccgccgugaacggcaagaagagcgcccacggcagccccaccuucuggaugggcagccacgaggugaacggcaccuggaugauccacacccuggaggcccuggacuacaaggagugcgaguggccccugacccacaccaucggcaccagcguggaggagagcgagauguucaugcccagaagcaucggcggccccgugagcagccacaaccacauccccggcuacaaggugcagaccaacggccccuggaugcaggugccccuggaggugaagagagaggccugccccggcaccagcgugaucaucgacggcaacugcgacggcagaggcaagagcaccagaagcaccaccgacagcggcaaggugauccccgaguggugcugcagaagcugcaccaugccccccgugagcuuccacggcagcgacggcugcugguaccccauggagaucagacccagaaagacccacgagagccaccuggugagaagcugggugaccgccugaggacuagucccuguucccagagcccacuuuuuuuucuuuuuuugaaauaaaauagccugucuuucagaucuaaaaaaaaaaaaaaaaaaaaaaaaaaaaaaaaaaaaaaaaaaaaaaaaaaaaaaaaaaaaaaaaugcaucccccccccccccccccccccccccccccccaaaggcucuuuucagagccaccagaauu

SEQ ID NO: 2548 - RNA, 1435 nt, Artificial Sequence
  mRNA product Design a-4 comprising derived and/or modified sequence from YFV__NC_002031.1__SSIgE-NS1 (polyprotein: aa779-1130) (opt4)
gggagacuccugucgggcggaaguaggaggaguagaguuuaaaaacaguacucuuuuuccgguucgggacguaguugaagcaacgacaagccggauaaccgcucuugagacaggaagcuuaccauggacuggaccuggauccuguuccugguggccgccgccaccagagugcacagcgaccagggcugcgccaucaacuucggcaagagagagcugaagugcggcgacggcaucuucaucuucagagacagcgacgacuggcugaacaaguacagcuacuaccccgaggaccccgugaagcuggccagcaucgugaaggccagcuucgaggagggcaagugcggccugaacagcguggacagccuggagcacgagauguggagaagcagagccgacgagaucaacgccaucuucgaggagaacgagguggacaucagcgugguggugcaggaccccaagaacguguaccagagaggcacccaccccuucagcagaaucagagacggccugcaguacggcuggaagaccuggggcaagaaccugguguucagccccggcagaaagaacggcagcuucaucaucgacggcaagagcagaaaggagugccccuucagcaacagaguguggaacagcuuccagaucgaggaguucggcaccggcguguucaccaccagaguguacauggacgccguguucgaguacaccaucgacugcgacggcagcauccugggcgccgccgugaacggcaagaagagcgcccacggcagccccaccuucuggaugggcagccacgaggugaacggcaccuggaugauccacacccuggaggcccuggacuacaaggagugcgaguggccccugacccacaccaucggcaccagcguggaggagagcgagauguucaugcccagaagcaucggcggccccgugagcagccacaaccacauccccggcuacaaggugcagaccaacggccccuggaugcaggugccccuggaggugaagagagaggccugccccggcaccagcgugaucaucgacggcaacugcgacggcagaggcaagagcaccagaagcaccaccgacagcggcaaggugauccccgaguggugcugcagaagcugcaccaugccccccgugagcuuccacggcagcgacggcugcugguaccccauggagaucagacccagaaagacccacgagagccaccuggugagaagcugggugaccgccugaggacuagucccuguucccagagcccacuuuuuuuucuuuuuuugaaauaaaauagccugucuuucagaucuaaaaaaaaaaaaaaaaaaaaaaaaaaaaaaaaaaaaaaaaaaaaaaaaaaaaaaaaaaaaaaaaugcaucccccccccccccccccccccccccccccccaaaggcucuuuucagagccaccagaauu

SEQ ID NO: 2549 - RNA, 1585 nt, Artificial Sequence
  mRNA product Design a-4 comprising derived and/or modified sequence from YFV__NC_002031.1__eSS-NS1-Y (polyprotein: aa758-1177) (opt5)
gggagacuccugucgggcggaaguaggaggaguagaguuuaaaaacaguacucuuuuuccgguucgggacguaguugaagcaacgacaagccggauaaccgcucuugagacaggaagcuuaccaugagcauguccaugauccuggugggcgucauuaugauguuccucucucuggggguuggagccgaccagggcugcgcuaucaacuuugggaagagagagcuuaaauguggagauggcauuuucaucuuucgggacagcgaugacuggcugaauaaguacuccuauuaccccgaagauccugugaaacucgccucuauugugaaggcgagcuucgaggaagggaaaugcggacugaacuccgucgacucucuugagcacgaaauguggcgcagcagagcugaugagaucaaugccaucuuugaggaaaacgagguggacauuuccguugugguccaagauccgaagaauguguaucagcggggcacccaucccuucagccgcaucagagacggccugcaguacggguggaagacauggggcaaaaaccucguguuuucuccuggacggaagaauggguccuucauuaucgauggaaaaagccgcaaggaaugucccuuuucuaacagaguguggaacuccuuccagauugaggaguuuggcacgggggucuucaccacacggguguauauggacgccguguuugaauacaccaucgauugcgacggaagcauucugggcgcugccgucaauggcaaaaagucugcucacggguccccuacauucuggaugggaagccaugagguuaauggcaccuggaugauccacacacuggaagcccucgacuauaaggagugugaauggccccugacccauacgaucgggaccuccguggaggagucugaaauguucaugccucgcagcauuggaggcccgguguccagccacaaccacauccccggguacaaaguccaaacaaauggaccuuggaugcagguuccccuugagguuaagagagaagcgugcccuggcaccucugugauuaucgauggcaacugugacgggcggggaaaauccacacgcagcaccacggauucuggcaaggucauucccgaguggugcuguagaagcugcacaaugccgccuguguccuuucaugggucugacggauguugguaccccauggaaauccggccucgcaaaacccacgagagccaucugguuagauccugggugacagccggcgagauccacgcuguccccuucgggcucgugagcaugaugauugccauggaagucgugcugcggaagagacagggccccaaacagaugcuuguuggaggcgugguccugcucggggcuaugcuggugggacaaguuaccugaggacuagucccuguucccagagcccacuuuuuuuucuuuuuuugaaauaaaauagccugucuuucagaucuaaaaaaaaaaaaaaaaaaaaaaaaaaaaaaaaaaaaaaaaaaaaaaaaaaaaaaaaaaaaaaaaugcaucccccccccccccccccccccccccccccccaaaggcucuuuucagagccaccagaauu

SEQ ID NO: 2550 - RNA, 1444 nt, Artificial Sequence
  mRNA product Design a-4 comprising derived and/or modified sequence from YFV__NC_002031.1__eSS-NS1 (polyprotein: aa758-1130) (opt5)
gggagacuccugucgggcggaaguaggaggaguagaguuuaaaaacaguacucuuuuuccgguucgggacguaguugaagcaacgacaagccggauaaccgcucuugagacaggaagcuuaccaugagcauguccaugauccuggugggcgucauuaugauguuccucucucuggggguuggagccgaccagggcugcgcuaucaacuuugggaagagagagcuuaaauguggagauggcauuuucaucuuucgggacagcgaugacuggcugaauaaguacuccuauuaccccgaagauccugugaaacucgccucuauugugaaggcgagcuucgaggaagggaaaugcggacugaacuccgucgacucucuugagcacgaaauguggcgcagcagagcugaugagaucaaugccaucuuugaggaaaacgagguggacauuuccguugugguccaagauccgaagaauguguaucagcggggcacccaucccuucagccgcaucagagacggccugcaguacggguggaagacauggggcaaaaaccucguguuuucuccuggacggaagaauggguccuucauuaucgauggaaaaagccgcaaggaaugucccuuuucuaacagaguguggaacuccuuccagauugaggaguuuggcacgggggucuucaccacacggguguauauggacgccguguuugaauacaccaucgauugcgacggaagcauucugggcgcugccgucaauggcaaaaagucugcucacggguccccuacauucuggaugggaagccaugagguuaauggcaccuggaugauccacacacuggaagcccucgacuauaaggagugugaauggccccugacccauacgaucgggaccuccguggaggagucugaaauguucaugccucgcagcauuggaggcccgguguccagccacaaccacauccccggguacaaaguccaaacaaauggaccuuggaugcagguuccccuugagguuaagagagaagcgugcccuggcaccucugugauuaucgauggcaacugugacgggcggggaaaauccacacgcagcaccacggauucuggcaaggucauucccgaguggugcuguagaagcugcacaaugccgccuguguccuuucaugggucugacggauguugguaccccauggaaauccggccucgcaaaacccacgagagccaucugguuagauccugggugacagccugaggacuagucccuguucccagagcccacuuuuuuuucuuuuuuugaaauaaaauagccugucuuucagaucuaaaaaaaaaaaaaaaaaaaaaaaaaaaaaaaaaaaaaaaaaaaaaaaaaaaaaaaaaaaaaaaaugcaucccccccccccccccccccccccccccccccaaaggcucuuuucagagccaccagaauu

SEQ ID NO: 2551 - RNA, 1435 nt, Artificial Sequence
  mRNA product Design a-4 comprising derived and/or modified sequence from YFV__NC_002031.1__SSIgE-NS1 (polyprotein: aa779-1130) (opt5)
gggagacuccugucgggcggaaguaggaggaguagaguuuaaaaacaguacucuuuuuccgguucgggacguaguugaagcaacgacaagccggauaaccgcucuugagacaggaagcuuaccauggacuggaccuggauccuguuccucguggccgcugccacaagaguccacagcgaccagggcugcgcuaucaacuuugggaagagagagcuuaaauguggagauggcauuuucaucuuucgggacagcgaugacuggcugaauaaguacuccuauuaccccgaagauccugugaaacucgccucuauugugaaggcgagcuucgaggaagggaaaugcggacugaacuccgucgacucucuugagcacgaaauguggcgcagcagagcugaugagaucaaugccaucuuugaggaaaacgagguggacauuuccguugugguccaagauccgaagaauguguaucagcggggcacccaucccuucagccgcaucagagacggccugcaguacggguggaagacauggggcaaaaaccucguguuuucuccuggacggaagaauggguccuucauuaucgauggaaaaagccgcaaggaaugucccuuuucuaacagaguguggaacuccuuccagauugaggaguuuggcacgggggucuucaccacacggguguauauggacgccguguuugaauacaccaucgauugcgacggaagcauucugggcgcugccgucaauggcaaaaagucugcucacggguccccuacauucuggaugggaagccaugagguuaauggcaccuggaugauccacacacuggaagcccucgacuauaaggagugugaauggccccugacccauacgaucgggaccuccguggaggagucugaaauguucaugccucgcagcauuggaggcccgguguccagccacaaccacauccccggguacaaaguccaaacaaauggaccuuggaugcagguuccccuugagguuaagagagaagcgugcccuggcaccucugugauuaucgauggcaacugugacgggcggggaaaauccacacgcagcaccacggauucuggcaaggucauucccgaguggugcuguagaagcugcacaaugccgccuguguccuuucaugggucugacggauguugguaccccauggaaauccggccucgcaaaacccacgagagccaucugguuagauccugggugacagccugaggacuagucccuguucccagagcccacuuuuuuuucuuuuuuugaaauaaaauagccugucuuucagaucuaaaaaaaaaaaaaaaaaaaaaaaaaaaaaaaaaaaaaaaaaaaaaaaaaaaaaaaaaaaaaaaaugcaucccccccccccccccccccccccccccccccaaaggcucuuuucagagccaccagaauu

SEQ ID NO: 2552 - RNA, 1585 nt, Artificial Sequence
  mRNA product Design a-4 comprising derived and/or modified sequence from YFV__NC_002031.1__eSS-NS1-Y (polyprotein: aa758-1177) (opt6)
gggagacuccugucgggcggaaguaggaggaguagaguuuaaaaacaguacucuuuuuccgguucgggacguaguugaagcaacgacaagccggauaaccgcucuugagacaggaagcuuaccaugucaaugaguaugauauuaguagggguaauaaugauguuccuuagcuuaggaguaggagcagaucaaggaugugcaauaaauuuuggaaaaagagaacuaaaaugcggagacgguauauuuauauuuagagauagugaugauuggcuaaauaaauauaguuacuauccagaagauccaguuaaauuagccucaauaguaaaagcuagcuuugaagaaggaaaauguggacuaaauucaguagacagucuagaacacgaaauguggagaucaagggcagaugaaauaaaugcaaucuuugaagaaaaugaaguggauauaucagugguaguacaagauccaaaaaauguguaccaaagaggaacacauccauuuaguaggauaagagauggauuacaauauggauggaaaacauggggaaaaaauuuaguauuuaguccaggaagaaaaaauggaucauuuauaauagaugggaaaagccgaaaagaauguccauuuucaaacagaguauggaacucauuucaaauugaagaauuuggaacaggaguauuuacaacaagaguauauauggaugcaguauuugaauacaccauagauugugauggaaguauauuaggagcagcaguaaaugggaaaaaaagcgcucacggaaguccaacguuuuggaugggaucacacgagguaaauggcacguggaugauacauacuuuagaagcauuagauuacaaagaaugugaauggccauuaacucauacaauagguacaagcguagaagaaagugagauguuuaugccacguucaaucggggggccaguaucaagucauaaccauauaccaggauauaaaguacaaacgaauggaccuuggaugcaaguaccacuagaaguaaaacgagaagcaugcccaggaacgucaguaauaauagauggaaauugugauggcagggguaaaagcacaagaucaacaacagauucaggaaaaguaauaccugaaugguguuguagaaguuguacaaugccaccaguaucauuccauggaagugauggaugcugguauccaauggaaauuagaccaagaaaaacucaugaaagucauuuaguaagaucuuggguaacugcaggagaaauacaugcaguaccauuugguuuaguaaguaugaugauagcaauggaaguaguucuaagaaaaaggcaagggccuaaacaaaugcuagugggaggaguaguauugcuaggugcaauguuaguaggccaaguaaccugaggacuagucccuguucccagagcccacuuuuuuuucuuuuuuugaaauaaaauagccugucuuucagaucuaaaaaaaaaaaaaaaaaaaaaaaaaaaaaaaaaaaaaaaaaaaaaaaaaaaaaaaaaaaaaaaaugcaucccccccccccccccccccccccccccccccaaaggcucuuuucagagccaccagaauu

SEQ ID NO: 2553 - RNA, 1444 nt, Artificial Sequence
  mRNA product Design a-4 comprising derived and/or modified sequence from YFV__NC_002031.1__eSS-NS1 (polyprotein: aa758-1130) (opt6)
gggagacuccugucgggcggaaguaggaggaguagaguuuaaaaacaguacucuuuuuccgguucgggacguaguugaagcaacgacaagccggauaaccgcucuugagacaggaagcuuaccaugucaaugaguaugauauuaguagggguaauaaugauguuccuuagcuuaggaguaggagcagaucaaggaugugcaauaaauuuuggaaaaagagaacuaaaaugcggagacgguauauuuauauuuagagauagugaugauuggcuaaauaaauauaguuacuauccagaagauccaguuaaauuagccucaauaguaaaagcuagcuuugaagaaggaaaauguggacuaaauucaguagacagucuagaacacgaaauguggagaucaagggcagaugaaauaaaugcaaucuuugaagaaaaugaaguggauauaucagugguaguacaagauccaaaaaauguguaccaaagaggaacacauccauuuaguaggauaagagauggauuacaauauggauggaaaacauggggaaaaaauuuaguauuuaguccaggaagaaaaaauggaucauuuauaauagaugggaaaagccgaaaagaauguccauuuucaaacagaguauggaacucauuucaaauugaagaauuuggaacaggaguauuuacaacaagaguauauauggaugcaguauuugaauacaccauagauugugauggaaguauauuaggagcagcaguaaaugggaaaaaaagcgcucacggaaguccaacguuuuggaugggaucacacgagguaaauggcacguggaugauacauacuuuagaagcauuagauuacaaagaaugugaauggccauuaacucauacaauagguacaagcguagaagaaagugagauguuuaugccacguucaaucggggggccaguaucaagucauaaccauauaccaggauauaaaguacaaacgaauggaccuuggaugcaaguaccacuagaaguaaaacgagaagcaugcccaggaacgucaguaauaauagauggaaauugugauggcagggguaaaagcacaagaucaacaacagauucaggaaaaguaauaccugaaugguguuguagaaguuguacaaugccaccaguaucauuccauggaagugauggaugcugguauccaauggaaauuagaccaagaaaaacucaugaaagucauuuaguaagaucuuggguaacugcaugaggacuagucccuguucccagagcccacuuuuuuuucuuuuuuugaaauaaaauagccugucuuucagaucuaaaaaaaaaaaaaaaaaaaaaaaaaaaaaaaaaaaaaaaaaaaaaaaaaaaaaaaaaaaaaaaaugcaucccccccccccccccccccccccccccccccaaaggcucuuuucagagccaccagaauu

SEQ ID NO: 2554 - RNA, 1435 nt, Artificial Sequence
  mRNA product Design a-4 comprising derived and/or modified sequence from YFV__NC_002031.1__SSIgE-NS1 (polyprotein: aa779-1130) (opt6)
gggagacuccugucgggcggaaguaggaggaguagaguuuaaaaacaguacucuuuuuccgguucgggacguaguugaagcaacgacaagccggauaaccgcucuugagacaggaagcuuaccauggacuggacauggauauuauuuuuaguagcagcagcaacaagaguacauucagaucaaggaugugcaauaaauuuuggaaaaagagaacuaaaaugcggagacgguauauuuauauuuagagauagugaugauuggcuaaauaaauauaguuacuauccagaagauccaguuaaauuagccucaauaguaaaagcuagcuuugaagaaggaaaauguggacuaaauucaguagacagucuagaacacgaaauguggagaucaagggcagaugaaauaaaugcaaucuuugaagaaaaugaaguggauauaucagugguaguacaagauccaaaaaauguguaccaaagaggaacacauccauuuaguaggauaagagauggauuacaauauggauggaaaacauggggaaaaaauuuaguauuuaguccaggaagaaaaaauggaucauuuauaauagaugggaaaagccgaaaagaauguccauuuucaaacagaguauggaacucauuucaaauugaagaauuuggaacaggaguauuuacaacaagaguauauauggaugcaguauuugaauacaccauagauugugauggaaguauauuaggagcagcaguaaaugggaaaaaaagcgcucacggaaguccaacguuuuggaugggaucacacgagguaaauggcacguggaugauacauacuuuagaagcauuagauuacaaagaaugugaauggccauuaacucauacaauagguacaagcguagaagaaagugagauguuuaugccacguucaaucggggggccaguaucaagucauaaccauauaccaggauauaaaguacaaacgaauggaccuuggaugcaaguaccacuagaaguaaaacgagaagcaugcccaggaacgucaguaauaauagauggaaauugugauggcagggguaaaagcacaagaucaacaacagauucaggaaaaguaauaccugaaugguguuguagaaguuguacaaugccaccaguaucauuccauggaagugauggaugcugguauccaauggaaauuagaccaagaaaaacucaugaaagucauuuaguaagaucuuggguaacugcaugaggacuagucccuguucccagagcccacuuuuuuuucuuuuuuugaaauaaaauagccugucuuucagaucuaaaaaaaaaaaaaaaaaaaaaaaaaaaaaaaaaaaaaaaaaaaaaaaaaaaaaaaaaaaaaaaaugcaucccccccccccccccccccccccccccccccaaaggcucuuuucagagccaccagaauu

SEQ ID NO: 2555 - RNA, 1585 nt, Artificial Sequence
  mRNA product Design a-4 comprising derived and/or modified sequence from YFV__NC_002031.1__eSS-NS1-Y (polyprotein: aa758-1177) (opt11)
gggagacuccugucgggcggaaguaggaggaguagaguuuaaaaacaguacucuuuuuccgguucgggacguaguugaagcaacgacaagccggauaaccgcucuugagacaggaagcuuaccaugagcaugagcaugaucuugguaggggucauaaugauguucuugagccuagggguaggcgcagaccagggaugcgcgauaaacuucggcaaacgcgaacucaaaugcggggacggaaucuucaucuuucgcgacagugacgacuggcuaaacaaguacaguuacuacccggaagaccccguaaaacuagccucaauaguaaaagcgagcuucgaagaaggaaagugcgggcuaaacagcguggacucccuagagcacgagauguggaggucgagagcggacgagaucaacgccauauucgaagaaaaugaaguagacauaagcguagucguacaagaucccaaaaacguguaccagcgcggaacccaccccuucagcaggaucagagacgggcuacaauacggauggaagacauggggcaaaaaccuggucuucagcccgggcaggaaaaacggaucguucaucaucgauggcaaaagccgaaaggagugcccguucucaaacaggguauggaacucguuccagaucgaagaguucggcacaggcgucuucacgacaagagucuacauggacgcaguguucgaauacacaaucgacugcgacggcuccauacugggcgcagccgugaacgggaaaaagagcgcacacggaagcccgaccuuuuggauggguucgcacgaggugaacggaacauggaugauacacaccuuagaagcacucgauuacaaagaaugcgaauggcccuuaacccacaccaucgguacguccguagaagaaagcgaaauguucaugccgcgcucaaucggcggcccagucucgagccacaaccacaucccgggcuauaaaguacaaacaaacgggccauggaugcagguaccccucgaggucaagcgcgaagccugccccggaaccucggucaucaucgacggcaacugcgacggcaggggaaaaagcacgcgcucaaccacggacucgggaaagguaauaccagaguggugcugcaggagcugcaccaugccaccgguaucguuccacggcucagacggaugcugguacccgauggaaaucagacccagaaaaacgcacgagagccaccucguacgcucauggguaaccgcaggcgagauccacgccgugccauuuggacuggucucaaugaugauagcgauggaggucgugcucaggaagaggcaagggcccaagcaaaugcucguaggaggaguaguacuccugggcgcaaugcuggucggacaggugaccugaggacuagucccuguucccagagcccacuuuuuuuucuuuuuuugaaauaaaauagccugucuuucagaucuaaaaaaaaaaaaaaaaaaaaaaaaaaaaaaaaaaaaaaaaaaaaaaaaaaaaaaaaaaaaaaaaugcaucccccccccccccccccccccccccccccccaaaggcucuuuucagagccaccagaauu

SEQ ID NO: 2556 - RNA, 1444 nt, Artificial Sequence
  mRNA product Design a-4 comprising derived and/or modified sequence from YFV__NC_002031.1__eSS-NS1 (polyprotein: aa758-1130) (opt11)
gggagacuccugucgggcggaaguaggaggaguagaguuuaaaaacaguacucuuuuuccgguucgggacguaguugaagcaacgacaagccggauaaccgcucuugagacaggaagcuuaccaugagcaugagcaugaucuugguaggggucauaaugauguucuugagccuagggguaggcgcagaccagggaugcgcgauaaacuucggcaaacgcgaacucaaaugcggggacggaaucuucaucuuucgcgacagugacgacuggcuaaacaaguacaguuacuacccggaagaccccguaaaacuagccucaauaguaaaagcgagcuucgaagaaggaaagugcgggcuaaacagcguggacucccuagagcacgagauguggaggucgagagcggacgagaucaacgccauauucgaagaaaaugaaguagacauaagcguagucguacaagaucccaaaaacguguaccagcgcggaacccaccccuucagcaggaucagagacgggcuacaauacggauggaagacauggggcaaaaaccuggucuucagcccgggcaggaaaaacggaucguucaucaucgauggcaaaagccgaaaggagugcccguucucaaacaggguauggaacucguuccagaucgaagaguucggcacaggcgucuucacgacaagagucuacauggacgcaguguucgaauacacaaucgacugcgacggcuccauacugggcgcagccgugaacgggaaaaagagcgcacacggaagcccgaccuuuuggauggguucgcacgaggugaacggaacauggaugauacacaccuuagaagcacucgauuacaaagaaugcgaauggcccuuaacccacaccaucgguacguccguagaagaaagcgaaauguucaugccgcgcucaaucggcggcccagucucgagccacaaccacaucccgggcuauaaaguacaaacaaacgggccauggaugcagguaccccucgaggucaagcgcgaagccugccccggaaccucggucaucaucgacggcaacugcgacggcaggggaaaaagcacgcgcucaaccacggacucgggaaagguaauaccagaguggugcugcaggagcugcaccaugccaccgguaucguuccacggcucagacggaugcugguacccgauggaaaucagacccagaaaaacgcacgagagccaccucguacgcucauggguaaccgcaugaggacuagucccuguucccagagcccacuuuuuuuucuuuuuuugaaauaaaauagccugucuuucagaucuaaaaaaaaaaaaaaaaaaaaaaaaaaaaaaaaaaaaaaaaaaaaaaaaaaaaaaaaaaaaaaaaugcaucccccccccccccccccccccccccccccccaaaggcucuuuucagagccaccagaauu

SEQ ID NO: 2557 - RNA, 1435 nt, Artificial Sequence
  mRNA product Design a-4 comprising derived and/or modified sequence from YFV__NC_002031.1__SSIgE-NS1 (polyprotein: aa779-1130) (opt11)
gggagacuccugucgggcggaaguaggaggaguagaguuuaaaaacaguacucuuuuuccgguucgggacguaguugaagcaacgacaagccggauaaccgcucuugagacaggaagcuuaccauggauuggacguggauacucuuucucguggccgcggccacgcgcgugcacucggaccagggaugcgcgauaaacuucggcaaacgcgaacucaaaugcggggacggaaucuucaucuuucgcgacagugacgacuggcuaaacaaguacaguuacuacccggaagaccccguaaaacuagccucaauaguaaaagcgagcuucgaagaaggaaagugcgggcuaaacagcguggacucccuagagcacgagauguggaggucgagagcggacgagaucaacgccauauucgaagaaaaugaaguagacauaagcguagucguacaagaucccaaaaacguguaccagcgcggaacccaccccuucagcaggaucagagacgggcuacaauacggauggaagacauggggcaaaaaccuggucuucagcccgggcaggaaaaacggaucguucaucaucgauggcaaaagccgaaaggagugcccguucucaaacaggguauggaacucguuccagaucgaagaguucggcacaggcgucuucacgacaagagucuacauggacgcaguguucgaauacacaaucgacugcgacggcuccauacugggcgcagccgugaacgggaaaaagagcgcacacggaagcccgaccuuuuggauggguucgcacgaggugaacggaacauggaugauacacaccuuagaagcacucgauuacaaagaaugcgaauggcccuuaacccacaccaucgguacguccguagaagaaagcgaaauguucaugccgcgcucaaucggcggcccagucucgagccacaaccacaucccgggcuauaaaguacaaacaaacgggccauggaugcagguaccccucgaggucaagcgcgaagccugccccggaaccucggucaucaucgacggcaacugcgacggcaggggaaaaagcacgcgcucaaccacggacucgggaaagguaauaccagaguggugcugcaggagcugcaccaugccaccgguaucguuccacggcucagacggaugcugguacccgauggaaaucagacccagaaaaacgcacgagagccaccucguacgcucauggguaaccgcaugaggacuagucccuguucccagagcccacuuuuuuuucuuuuuuugaaauaaaauagccugucuuucagaucuaaaaaaaaaaaaaaaaaaaaaaaaaaaaaaaaaaaaaaaaaaaaaaaaaaaaaaaaaaaaaaaaugcaucccccccccccccccccccccccccccccccaaaggcucuuuucagagccaccagaauu

SEQ ID NO: 2558 - RNA, 1504 nt, Artificial Sequence
  mRNA product Design a-1 (hSL-A64-N5) comprising derived and/or modified sequence from YFV__NC_002031.1__eSS-NS1-Y (polyprotein: aa758-1177) (opt1)
gggagagucccgcagucggcguccagcggcucugcuuguucgugugugugucguugcaggccuuauucaagcuuaccaugagcauguccaugauccuggugggcgucaucaugauguuccucagccugggggugggcgccgaccaggggugcgccaucaacuucggcaagcgcgagcugaagugcggggacggcaucuucaucuuccgggacuccgacgacuggcucaacaaguacagcuacuaccccgaggacccggugaagcuggcguccaucgucaaggccagcuucgaggagggcaagugcgggcugaacuccguggacagccucgagcacgagauguggcgcucccgggccgacgagaucaacgccaucuucgaggagaacgagguggacaucagcgucguggugcaggaccccaagaacgucuaccagcgcggcacccaccccuucucccggauccgcgacgggcugcaguacggcuggaagaccugggggaagaaccugguguucagccccggccggaagaacggcuccuucaucaucgacggcaagagccgcaaggagugcccguucuccaaccggguguggaacagcuuccagaucgaggaguucgggacgggggucuucaccacccgcguguacauggacgccguguucgaguacaccaucgacugcgacggcuccauccucggcgcggccgucaacgggaagaaguccgcccacggcagccccacguucuggauggggagccacgaggugaacggcaccuggaugauccacacccuggaggcccuggacuacaaggagugcgaguggccccucacccacacgaucgggaccagcguggaggaguccgagauguucaugccccggagcaucggcggcccggucuccagccacaaccacauccccggguacaaggugcagaccaacggccccuggaugcaggucccccuggaggugaagcgcgaggcgugcccggggaccuccgugaucaucgacggcaacugcgacgggcggggcaagagcacgcgcuccaccaccgacagcggcaaggugauccccgaguggugcugccgguccugcaccaugccgcccgucagcuuccacggguccgacggcugcugguaccccauggagauccgcccccggaagacgcacgagagccaccuggugcgcuccugggucaccgccggggagauccacgccgugcccuucggccucgugagcaugaugaucgccauggaggucgugcugcggaagcgccaggggcccaagcagaugcuggugggcggcgucgugcuccugggggccaugcuggugggccaggucaccugaggacuagucccuguucccagagcccacuuuuuuuucuuuuuuugaaauaaaauagccugucuuucagaucucaaaggcucuuuucagagccaccaaaaaaaaaaaaaaaaaaaaaaaaaaaaaaaaaaaaaaaaaaaaaaaaaaaaaaaaaaaaaaaaagaauu

SEQ ID NO: 2559 - RNA, 1363 nt, Artificial Sequence
  mRNA product Design a-1 (hSL-A64-N5) comprising derived and/or modified sequence from YFV__NC_002031.1__eSS-NS1 (polyprotein: aa758-1130) (opt1)
gggagagucccgcagucggcguccagcggcucugcuuguucgugugugugucguugcaggccuuauucaagcuuaccaugagcauguccaugauccuggugggcgucaucaugauguuccucagccugggggugggcgccgaccaggggugcgccaucaacuucggcaagcgcgagcugaagugcggggacggcaucuucaucuuccgggacuccgacgacuggcucaacaaguacagcuacuaccccgaggacccggugaagcuggcguccaucgucaaggccagcuucgaggagggcaagugcgggcugaacuccguggacagccucgagcacgagauguggcgcucccgggccgacgagaucaacgccaucuucgaggagaacgagguggacaucagcgucguggugcaggaccccaagaacgucuaccagcgcggcacccaccccuucucccggauccgcgacgggcugcaguacggcuggaagaccugggggaagaaccugguguucagccccggccggaagaacggcuccuucaucaucgacggcaagagccgcaaggagugcccguucuccaaccggguguggaacagcuuccagaucgaggaguucgggacgggggucuucaccacccgcguguacauggacgccguguucgaguacaccaucgacugcgacggcuccauccucggcgcggccgucaacgggaagaaguccgcccacggcagccccacguucuggauggggagccacgaggugaacggcaccuggaugauccacacccuggaggcccuggacuacaaggagugcgaguggccccucacccacacgaucgggaccagcguggaggaguccgagauguucaugccccggagcaucggcggcccggucuccagccacaaccacauccccggguacaaggugcagaccaacggccccuggaugcaggucccccuggaggugaagcgcgaggcgugcccggggaccuccgugaucaucgacggcaacugcgacgggcggggcaagagcacgcgcuccaccaccgacagcggcaaggugauccccgaguggugcugccgguccugcaccaugccgcccgucagcuuccacggguccgacggcugcugguaccccauggagauccgcccccggaagacgcacgagagccaccuggugcgcuccugggucaccgccugaggacuagucccuguucccagagcccacuuuuuuuucuuuuuuugaaauaaaauagccugucuuucagaucucaaaggcucuuuucagagccaccaaaaaaaaaaaaaaaaaaaaaaaaaaaaaaaaaaaaaaaaaaaaaaaaaaaaaaaaaaaaaaaaagaauu

SEQ ID NO: 2560 - RNA, 1354 nt, Artificial Sequence
  mRNA product Design a-1 (hSL-A64-N5) comprising derived and/or modified sequence from YFV__NC_002031.1__SSIgE-NS1 (polyprotein: aa779-1130) (opt1)
gggagagucccgcagucggcguccagcggcucugcuuguucgugugugugucguugcaggccuuauucaagcuuaccauggacuggaccuggauccuguuccucguggccgccgcgacccgcguccacagcgaccaggggugcgccaucaacuucggcaagcgcgagcugaagugcggggacggcaucuucaucuuccgggacuccgacgacuggcucaacaaguacagcuacuaccccgaggacccggugaagcuggcguccaucgucaaggccagcuucgaggagggcaagugcgggcugaacuccguggacagccucgagcacgagauguggcgcucccgggccgacgagaucaacgccaucuucgaggagaacgagguggacaucagcgucguggugcaggaccccaagaacgucuaccagcgcggcacccaccccuucucccggauccgcgacgggcugcaguacggcuggaagaccugggggaagaaccugguguucagccccggccggaagaacggcuccuucaucaucgacggcaagagccgcaaggagugcccguucuccaaccggguguggaacagcuuccagaucgaggaguucgggacgggggucuucaccacccgcguguacauggacgccguguucgaguacaccaucgacugcgacggcuccauccucggcgcggccgucaacgggaagaaguccgcccacggcagccccacguucuggauggggagccacgaggugaacggcaccuggaugauccacacccuggaggcccuggacuacaaggagugcgaguggccccucacccacacgaucgggaccagcguggaggaguccgagauguucaugccccggagcaucggcggcccggucuccagccacaaccacauccccggguacaaggugcagaccaacggccccuggaugcaggucccccuggaggugaagcgcgaggcgugcccggggaccuccgugaucaucgacggcaacugcgacgggcggggcaagagcacgcgcuccaccaccgacagcggcaaggugauccccgaguggugcugccgguccugcaccaugccgcccgucagcuuccacggguccgacggcugcugguaccccauggagauccgcccccggaagacgcacgagagccaccuggugcgcuccugggucaccgccugaggacuagucccuguucccagagcccacuuuuuuuucuuuuuuugaaauaaaauagccugucuuucagaucucaaaggcucuuuucagagccaccaaaaaaaaaaaaaaaaaaaaaaaaaaaaaaaaaaaaaaaaaaaaaaaaaaaaaaaaaaaaaaaaagaauu

SEQ ID NO: 2561 - RNA, 1445 nt, Artificial Sequence
  mRNA product Design i-3 (hSL-A64-N5) comprising derived and/or modified sequence from YFV__NC_002031.1__eSS-NS1-Y (polyprotein: aa758-1177) (opt1)
gggagaaagcuuaccaugagcauguccaugauccuggugggcgucaucaugauguuccucagccugggggugggcgccgaccaggggugcgccaucaacuucggcaagcgcgagcugaagugcggggacggcaucuucaucuuccgggacuccgacgacuggcucaacaaguacagcuacuaccccgaggacccggugaagcuggcguccaucgucaaggccagcuucgaggagggcaagugcgggcugaacuccguggacagccucgagcacgagauguggcgcucccgggccgacgagaucaacgccaucuucgaggagaacgagguggacaucagcgucguggugcaggaccccaagaacgucuaccagcgcggcacccaccccuucucccggauccgcgacgggcugcaguacggcuggaagaccugggggaagaaccugguguucagccccggccggaagaacggcuccuucaucaucgacggcaagagccgcaaggagugcccguucuccaaccggguguggaacagcuuccagaucgaggaguucgggacgggggucuucaccacccgcguguacauggacgccguguucgaguacaccaucgacugcgacggcuccauccucggcgcggccgucaacgggaagaaguccgcccacggcagccccacguucuggauggggagccacgaggugaacggcaccuggaugauccacacccuggaggcccuggacuacaaggagugcgaguggccccucacccacacgaucgggaccagcguggaggaguccgagauguucaugccccggagcaucggcggcccggucuccagccacaaccacauccccggguacaaggugcagaccaacggccccuggaugcaggucccccuggaggugaagcgcgaggcgugcccggggaccuccgugaucaucgacggcaacugcgacgggcggggcaagagcacgcgcuccaccaccgacagcggcaaggugauccccgaguggugcugccgguccugcaccaugccgcccgucagcuuccacggguccgacggcugcugguaccccauggagauccgcccccggaagacgcacgagagccaccuggugcgcuccugggucaccgccggggagauccacgccgugcccuucggccucgugagcaugaugaucgccauggaggucgugcugcggaagcgccaggggcccaagcagaugcuggugggcggcgucgugcuccugggggccaugcuggugggccaggucaccugaggacuaguuauaagacugacuagcccgaugggccucccaacgggcccuccuccccuccuugcaccgagauuaaucaaaggcucuuuucagagccaccaaaaaaaaaaaaaaaaaaaaaaaaaaaaaaaaaaaaaaaaaaaaaaaaaaaaaaaaaaaaaaaaagaauu

SEQ ID NO: 2562 - RNA, 1304 nt, Artificial Sequence
  mRNA product Design i-3 (hSL-A64-N5) comprising derived and/or modified sequence from YFV__NC_002031.1__eSS-NS1 (polyprotein: aa758-1130) (opt1)
gggagaaagcuuaccaugagcauguccaugauccuggugggcgucaucaugauguuccucagccugggggugggcgccgaccaggggugcgccaucaacuucggcaagcgcgagcugaagugcggggacggcaucuucaucuuccgggacuccgacgacuggcucaacaaguacagcuacuaccccgaggacccggugaagcuggcguccaucgucaaggccagcuucgaggagggcaagugcgggcugaacuccguggacagccucgagcacgagauguggcgcucccgggccgacgagaucaacgccaucuucgaggagaacgagguggacaucagcgucguggugcaggaccccaagaacgucuaccagcgcggcacccaccccuucucccggauccgcgacgggcugcaguacggcuggaagaccugggggaagaaccugguguucagccccggccggaagaacggcuccuucaucaucgacggcaagagccgcaaggagugcccguucuccaaccggguguggaacagcuuccagaucgaggaguucgggacgggggucuucaccacccgcguguacauggacgccguguucgaguacaccaucgacugcgacggcuccauccucggcgcggccgucaacgggaagaaguccgcccacggcagccccacguucuggauggggagccacgaggugaacggcaccuggaugauccacacccuggaggcccuggacuacaaggagugcgaguggccccucacccacacgaucgggaccagcguggaggaguccgagauguucaugccccggagcaucggcggcccggucuccagccacaaccacauccccggguacaaggugcagaccaacggccccuggaugcaggucccccuggaggugaagcgcgaggcgugcccggggaccuccgugaucaucgacggcaacugcgacgggcggggcaagagcacgcgcuccaccaccgacagcggcaaggugauccccgaguggugcugccgguccugcaccaugccgcccgucagcuuccacggguccgacggcugcugguaccccauggagauccgcccccggaagacgcacgagagccaccuggugcgcuccugggucaccgccugaggacuaguuauaagacugacuagcccgaugggccucccaacgggcccuccuccccuccuugcaccgagauuaaucaaaggcucuuuucagagccaccaaaaaaaaaaaaaaaaaaaaaaaaaaaaaaaaaaaaaaaaaaaaaaaaaaaaaaaaaaaaaaaaagaauu

SEQ ID NO: 2563 - RNA, 1295 nt, Artificial Sequence
  mRNA product Design i-3 (hSL-A64-N5) comprising derived and/or modified sequence from YFV__NC_002031.1__SSIgE-NS1 (polyprotein: aa779-1130) (opt1)
gggagaaagcuuaccauggacuggaccuggauccuguuccucguggccgccgcgacccgcguccacagcgaccaggggugcgccaucaacuucggcaagcgcgagcugaagugcggggacggcaucuucaucuuccgggacuccgacgacuggcucaacaaguacagcuacuaccccgaggacccggugaagcuggcguccaucgucaaggccagcuucgaggagggcaagugcgggcugaacuccguggacagccucgagcacgagauguggcgcucccgggccgacgagaucaacgccaucuucgaggagaacgagguggacaucagcgucguggugcaggaccccaagaacgucuaccagcgcggcacccaccccuucucccggauccgcgacgggcugcaguacggcuggaagaccugggggaagaaccugguguucagccccggccggaagaacggcuccuucaucaucgacggcaagagccgcaaggagugcccguucuccaaccggguguggaacagcuuccagaucgaggaguucgggacgggggucuucaccacccgcguguacauggacgccguguucgaguacaccaucgacugcgacggcuccauccucggcgcggccgucaacgggaagaaguccgcccacggcagccccacguucuggauggggagccacgaggugaacggcaccuggaugauccacacccuggaggcccuggacuacaaggagugcgaguggccccucacccacacgaucgggaccagcguggaggaguccgagauguucaugccccggagcaucggcggcccggucuccagccacaaccacauccccggguacaaggugcagaccaacggccccuggaugcaggucccccuggaggugaagcgcgaggcgugcccggggaccuccgugaucaucgacggcaacugcgacgggcggggcaagagcacgcgcuccaccaccgacagcggcaaggugauccccgaguggugcugccgguccugcaccaugccgcccgucagcuuccacggguccgacggcugcugguaccccauggagauccgcccccggaagacgcacgagagccaccuggugcgcuccugggucaccgccugaggacuaguuauaagacugacuagcccgaugggccucccaacgggcccuccuccccuccuugcaccgagauuaaucaaaggcucuuuucagagccaccaaaaaaaaaaaaaaaaaaaaaaaaaaaaaaaaaaaaaaaaaaaaaaaaaaaaaaaaaaaaaaaaagaauu

SEQ ID NO: 2564 - RNA, 1515 nt, Artificial Sequence
  mRNA product Design a-1 (A64-N5-hSL-N5) comprising derived and/or modified sequence from YFV__NC_002031.1__eSS-NS1-Y (polyprotein: aa758-1177) (opt1)
gggagagucccgcagucggcguccagcggcucugcuuguucgugugugugucguugcaggccuuauucaagcuuaccaugagcauguccaugauccuggugggcgucaucaugauguuccucagccugggggugggcgccgaccaggggugcgccaucaacuucggcaagcgcgagcugaagugcggggacggcaucuucaucuuccgggacuccgacgacuggcucaacaaguacagcuacuaccccgaggacccggugaagcuggcguccaucgucaaggccagcuucgaggagggcaagugcgggcugaacuccguggacagccucgagcacgagauguggcgcucccgggccgacgagaucaacgccaucuucgaggagaacgagguggacaucagcgucguggugcaggaccccaagaacgucuaccagcgcggcacccaccccuucucccggauccgcgacgggcugcaguacggcuggaagaccugggggaagaaccugguguucagccccggccggaagaacggcuccuucaucaucgacggcaagagccgcaaggagugcccguucuccaaccggguguggaacagcuuccagaucgaggaguucgggacgggggucuucaccacccgcguguacauggacgccguguucgaguacaccaucgacugcgacggcuccauccucggcgcggccgucaacgggaagaaguccgcccacggcagccccacguucuggauggggagccacgaggugaacggcaccuggaugauccacacccuggaggcccuggacuacaaggagugcgaguggccccucacccacacgaucgggaccagcguggaggaguccgagauguucaugccccggagcaucggcggcccggucuccagccacaaccacauccccggguacaaggugcagaccaacggccccuggaugcaggucccccuggaggugaagcgcgaggcgugcccggggaccuccgugaucaucgacggcaacugcgacgggcggggcaagagcacgcgcuccaccaccgacagcggcaaggugauccccgaguggugcugccgguccugcaccaugccgcccgucagcuuccacggguccgacggcugcugguaccccauggagauccgcccccggaagacgcacgagagccaccuggugcgcuccugggucaccgccggggagauccacgccgugcccuucggccucgugagcaugaugaucgccauggaggucgugcugcggaagcgccaggggcccaagcagaugcuggugggcggcgucgugcuccugggggccaugcuggugggccaggucaccugaggacuagucccuguucccagagcccacuuuuuuuucuuuuuuugaaauaaaauagccugucuuucauuaauagaucuaaaaaaaaaaaaaaaaaaaaaaaaaaaaaaaaaaaaaaaaaaaaaaaaaaaaaaaaaaaaaaaaugcaucaaaggcucuuuucagagccaccagaauu

SEQ ID NO: 2565 - RNA, 1374 nt, Artificial Sequence
  mRNA product Design a-1 (A64-N5-hSL-N5) comprising derived and/or modified sequence from YFV__NC_002031.1__eSS-NS1 (polyprotein: aa758-1130) (opt1)
gggagagucccgcagucggcguccagcggcucugcuuguucgugugugugucguugcaggccuuauucaagcuuaccaugagcauguccaugauccuggugggcgucaucaugauguuccucagccugggggugggcgccgaccaggggugcgccaucaacuucggcaagcgcgagcugaagugcggggacggcaucuucaucuuccgggacuccgacgacuggcucaacaaguacagcuacuaccccgaggacccggugaagcuggcguccaucgucaaggccagcuucgaggagggcaagugcgggcugaacuccguggacagccucgagcacgagauguggcgcucccgggccgacgagaucaacgccaucuucgaggagaacgagguggacaucagcgucguggugcaggaccccaagaacgucuaccagcgcggcacccaccccuucucccggauccgcgacgggcugcaguacggcuggaagaccugggggaagaaccugguguucagccccggccggaagaacggcuccuucaucaucgacggcaagagccgcaaggagugcccguucuccaaccggguguggaacagcuuccagaucgaggaguucgggacgggggucuucaccacccgcguguacauggacgccguguucgaguacaccaucgacugcgacggcuccauccucggcgcggccgucaacgggaagaaguccgcccacggcagccccacguucuggauggggagccacgaggugaacggcaccuggaugauccacacccuggaggcccuggacuacaaggagugcgaguggccccucacccacacgaucgggaccagcguggaggaguccgagauguucaugccccggagcaucggcggcccggucuccagccacaaccacauccccggguacaaggugcagaccaacggccccuggaugcaggucccccuggaggugaagcgcgaggcgugcccggggaccuccgugaucaucgacggcaacugcgacgggcggggcaagagcacgcgcuccaccaccgacagcggcaaggugauccccgaguggugcugccgguccugcaccaugccgcccgucagcuuccacggguccgacggcugcugguaccccauggagauccgcccccggaagacgcacgagagccaccuggugcgcuccugggucaccgccugaggacuagucccuguucccagagcccacuuuuuuuucuuuuuuugaaauaaaauagccugucuuucauuaauagaucuaaaaaaaaaaaaaaaaaaaaaaaaaaaaaaaaaaaaaaaaaaaaaaaaaaaaaaaaaaaaaaaaugcaucaaaggcucuuuucagagccaccagaauu

SEQ ID NO: 2566 - RNA, 1365 nt, Artificial Sequence
  mRNA product Design a-1 (A64-N5-hSL-N5) comprising derived and/or modified sequence from YFV__NC_002031.1__SSIgE-NS1 (polyprotein: aa779-1130) (opt1)
gggagagucccgcagucggcguccagcggcucugcuuguucgugugugugucguugcaggccuuauucaagcuuaccauggacuggaccuggauccuguuccucguggccgccgcgacccgcguccacagcgaccaggggugcgccaucaacuucggcaagcgcgagcugaagugcggggacggcaucuucaucuuccgggacuccgacgacuggcucaacaaguacagcuacuaccccgaggacccggugaagcuggcguccaucgucaaggccagcuucgaggagggcaagugcgggcugaacuccguggacagccucgagcacgagauguggcgcucccgggccgacgagaucaacgccaucuucgaggagaacgagguggacaucagcgucguggugcaggaccccaagaacgucuaccagcgcggcacccaccccuucucccggauccgcgacgggcugcaguacggcuggaagaccugggggaagaaccugguguucagccccggccggaagaacggcuccuucaucaucgacggcaagagccgcaaggagugcccguucuccaaccggguguggaacagcuuccagaucgaggaguucgggacgggggucuucaccacccgcguguacauggacgccguguucgaguacaccaucgacugcgacggcuccauccucggcgcggccgucaacgggaagaaguccgcccacggcagccccacguucuggauggggagccacgaggugaacggcaccuggaugauccacacccuggaggcccuggacuacaaggagugcgaguggccccucacccacacgaucgggaccagcguggaggaguccgagauguucaugccccggagcaucggcggcccggucuccagccacaaccacauccccggguacaaggugcagaccaacggccccuggaugcaggucccccuggaggugaagcgcgaggcgugcccggggaccuccgugaucaucgacggcaacugcgacgggcggggcaagagcacgcgcuccaccaccgacagcggcaaggugauccccgaguggugcugccgguccugcaccaugccgcccgucagcuuccacggguccgacggcugcugguaccccauggagauccgcccccggaagacgcacgagagccaccuggugcgcuccugggucaccgccugaggacuagucccuguucccagagcccacuuuuuuuucuuuuuuugaaauaaaauagccugucuuucauuaauagaucuaaaaaaaaaaaaaaaaaaaaaaaaaaaaaaaaaaaaaaaaaaaaaaaaaaaaaaaaaaaaaaaaugcaucaaaggcucuuuucagagccaccagaauu

SEQ ID NO: 2567 - RNA, 1456 nt, Artificial Sequence
  mRNA product Design i-3 (A64-N5-hSL-N5) comprising derived and/or modified sequence from YFV__NC_002031.1__eSS-NS1-Y (polyprotein: aa758-1177) (opt1)
gggagaaagcuuaccaugagcauguccaugauccuggugggcgucaucaugauguuccucagccugggggugggcgccgaccaggggugcgccaucaacuucggcaagcgcgagcugaagugcggggacggcaucuucaucuuccgggacuccgacgacuggcucaacaaguacagcuacuaccccgaggacccggugaagcuggcguccaucgucaaggccagcuucgaggagggcaagugcgggcugaacuccguggacagccucgagcacgagauguggcgcucccgggccgacgagaucaacgccaucuucgaggagaacgagguggacaucagcgucguggugcaggaccccaagaacgucuaccagcgcggcacccaccccuucucccggauccgcgacgggcugcaguacggcuggaagaccugggggaagaaccugguguucagccccggccggaagaacggcuccuucaucaucgacggcaagagccgcaaggagugcccguucuccaaccggguguggaacagcuuccagaucgaggaguucgggacgggggucuucaccacccgcguguacauggacgccguguucgaguacaccaucgacugcgacggcuccauccucggcgcggccgucaacgggaagaaguccgcccacggcagccccacguucuggauggggagccacgaggugaacggcaccuggaugauccacacccuggaggcccuggacuacaaggagugcgaguggccccucacccacacgaucgggaccagcguggaggaguccgagauguucaugccccggagcaucggcggcccggucuccagccacaaccacauccccggguacaaggugcagaccaacggccccuggaugcaggucccccuggaggugaagcgcgaggcgugcccggggaccuccgugaucaucgacggcaacugcgacgggcggggcaagagcacgcgcuccaccaccgacagcggcaaggugauccccgaguggugcugccgguccugcaccaugccgcccgucagcuuccacggguccgacggcugcugguaccccauggagauccgcccccggaagacgcacgagagccaccuggugcgcuccugggucaccgccggggagauccacgccgugcccuucggccucgugagcaugaugaucgccauggaggucgugcugcggaagcgccaggggcccaagcagaugcuggugggcggcgucgugcuccugggggccaugcuggugggccaggucaccugaggacuaguuauaagacugacuagcccgaugggccucccaacgggcccuccuccccuccuugcaccgagauuaauagaucuaaaaaaaaaaaaaaaaaaaaaaaaaaaaaaaaaaaaaaaaaaaaaaaaaaaaaaaaaaaaaaaaugcaucaaaggcucuuuucagagccaccagaauu

SEQ ID NO: 2568 - RNA, 1315 nt, Artificial Sequence
  mRNA product Design i-3 (A64-N5-hSL-N5) comprising derived and/or modified sequence from YFV__NC_002031.1__eSS-NS1 (polyprotein: aa758-1130) (opt1)
gggagaaagcuuaccaugagcauguccaugauccuggugggcgucaucaugauguuccucagccugggggugggcgccgaccaggggugcgccaucaacuucggcaagcgcgagcugaagugcggggacggcaucuucaucuuccgggacuccgacgacuggcucaacaaguacagcuacuaccccgaggacccggugaagcuggcguccaucgucaaggccagcuucgaggagggcaagugcgggcugaacuccguggacagccucgagcacgagauguggcgcucccgggccgacgagaucaacgccaucuucgaggagaacgagguggacaucagcgucguggugcaggaccccaagaacgucuaccagcgcggcacccaccccuucucccggauccgcgacgggcugcaguacggcuggaagaccugggggaagaaccugguguucagccccggccggaagaacggcuccuucaucaucgacggcaagagccgcaaggagugcccguucuccaaccggguguggaacagcuuccagaucgaggaguucgggacgggggucuucaccacccgcguguacauggacgccguguucgaguacaccaucgacugcgacggcuccauccucggcgcggccgucaacgggaagaaguccgcccacggcagccccacguucuggauggggagccacgaggugaacggcaccuggaugauccacacccuggaggcccuggacuacaaggagugcgaguggccccucacccacacgaucgggaccagcguggaggaguccgagauguucaugccccggagcaucggcggcccggucuccagccacaaccacauccccggguacaaggugcagaccaacggccccuggaugcaggucccccuggaggugaagcgcgaggcgugcccggggaccuccgugaucaucgacggcaacugcgacgggcggggcaagagcacgcgcuccaccaccgacagcggcaaggugauccccgaguggugcugccgguccugcaccaugccgcccgucagcuuccacggguccgacggcugcugguaccccauggagauccgcccccggaagacgcacgagagccaccuggugcgcuccugggucaccgccugaggacuaguuauaagacugacuagcccgaugggccucccaacgggcccuccuccccuccuugcaccgagauuaauagaucuaaaaaaaaaaaaaaaaaaaaaaaaaaaaaaaaaaaaaaaaaaaaaaaaaaaaaaaaaaaaaaaaugcaucaaaggcucuuuucagagccaccagaauu

SEQ ID NO: 2569 - RNA, 1306 nt, Artificial Sequence
  mRNA product Design i-3 (A64-N5-hSL-N5) comprising derived and/or modified sequence from YFV__NC_002031.1__SSIgE-NS1 (polyprotein: aa779-1130) (opt1)
gggagaaagcuuaccauggacuggaccuggauccuguuccucguggccgccgcgacccgcguccacagcgaccaggggugcgccaucaacuucggcaagcgcgagcugaagugcggggacggcaucuucaucuuccgggacuccgacgacuggcucaacaaguacagcuacuaccccgaggacccggugaagcuggcguccaucgucaaggccagcuucgaggagggcaagugcgggcugaacuccguggacagccucgagcacgagauguggcgcucccgggccgacgagaucaacgccaucuucgaggagaacgagguggacaucagcgucguggugcaggaccccaagaacgucuaccagcgcggcacccaccccuucucccggauccgcgacgggcugcaguacggcuggaagaccugggggaagaaccugguguucagccccggccggaagaacggcuccuucaucaucgacggcaagagccgcaaggagugcccguucuccaaccggguguggaacagcuuccagaucgaggaguucgggacgggggucuucaccacccgcguguacauggacgccguguucgaguacaccaucgacugcgacggcuccauccucggcgcggccgucaacgggaagaaguccgcccacggcagccccacguucuggauggggagccacgaggugaacggcaccuggaugauccacacccuggaggcccuggacuacaaggagugcgaguggccccucacccacacgaucgggaccagcguggaggaguccgagauguucaugccccggagcaucggcggcccggucuccagccacaaccacauccccggguacaaggugcagaccaacggccccuggaugcaggucccccuggaggugaagcgcgaggcgugcccggggaccuccgugaucaucgacggcaacugcgacgggcggggcaagagcacgcgcuccaccaccgacagcggcaaggugauccccgaguggugcugccgguccugcaccaugccgcccgucagcuuccacggguccgacggcugcugguaccccauggagauccgcccccggaagacgcacgagagccaccuggugcgcuccugggucaccgccugaggacuaguuauaagacugacuagcccgaugggccucccaacgggcccuccuccccuccuugcaccgagauuaauagaucuaaaaaaaaaaaaaaaaaaaaaaaaaaaaaaaaaaaaaaaaaaaaaaaaaaaaaaaaaaaaaaaaugcaucaaaggcucuuuucagagccaccagaauu

SEQ ID NO: 2570 - RNA, 1535 nt, Artificial Sequence
  mRNA product Design a-1 (hSL-A100) comprising derived and/or modified sequence from YFV__NC_002031.1__eSS-NS1-Y (polyprotein: aa758-1177) (opt1)
gggagagucccgcagucggcguccagcggcucugcuuguucgugugugugucguugcaggccuuauucaagcuuaccaugagcauguccaugauccuggugggcgucaucaugauguuccucagccugggggugggcgccgaccaggggugcgccaucaacuucggcaagcgcgagcugaagugcggggacggcaucuucaucuuccgggacuccgacgacuggcucaacaaguacagcuacuaccccgaggacccggugaagcuggcguccaucgucaaggccagcuucgaggagggcaagugcgggcugaacuccguggacagccucgagcacgagauguggcgcucccgggccgacgagaucaacgccaucuucgaggagaacgagguggacaucagcgucguggugcaggaccccaagaacgucuaccagcgcggcacccaccccuucucccggauccgcgacgggcugcaguacggcuggaagaccugggggaagaaccugguguucagccccggccggaagaacggcuccuucaucaucgacggcaagagccgcaaggagugcccguucuccaaccggguguggaacagcuuccagaucgaggaguucgggacgggggucuucaccacccgcguguacauggacgccguguucgaguacaccaucgacugcgacggcuccauccucggcgcggccgucaacgggaagaaguccgcccacggcagccccacguucuggauggggagccacgaggugaacggcaccuggaugauccacacccuggaggcccuggacuacaaggagugcgaguggccccucacccacacgaucgggaccagcguggaggaguccgagauguucaugccccggagcaucggcggcccggucuccagccacaaccacauccccggguacaaggugcagaccaacggccccuggaugcaggucccccuggaggugaagcgcgaggcgugcccggggaccuccgugaucaucgacggcaacugcgacgggcggggcaagagcacgcgcuccaccaccgacagcggcaaggugauccccgaguggugcugccgguccugcaccaugccgcccgucagcuuccacggguccgacggcugcugguaccccauggagauccgcccccggaagacgcacgagagccaccuggugcgcuccugggucaccgccggggagauccacgccgugcccuucggccucgugagcaugaugaucgccauggaggucgugcugcggaagcgccaggggcccaagcagaugcuggugggcggcgucgugcuccugggggccaugcuggugggccaggucaccugaggacuagucccuguucccagagcccacuuuuuuuucuuuuuuugaaauaaaauagccugucuuucagaucucaaaggcucuuuucagagccaccaaaaaaaaaaaaaaaaaaaaaaaaaaaaaaaaaaaaaaaaaaaaaaaaaaaaaaaaaaaaaaaaaaaaaaaaaaaaaaaaaaaaaaaaaaaaaaaaaaaaa

SEQ ID NO: 2571 - RNA, 1394 nt, Artificial Sequence
  mRNA product Design a-1 (hSL-A100) comprising derived and/or modified sequence from YFV__NC_002031.1__eSS-NS1 (polyprotein: aa758-1130) (opt1)
gggagagucccgcagucggcguccagcggcucugcuuguucgugugugugucguugcaggccuuauucaagcuuaccaugagcauguccaugauccuggugggcgucaucaugauguuccucagccugggggugggcgccgaccaggggugcgccaucaacuucggcaagcgcgagcugaagugcggggacggcaucuucaucuuccgggacuccgacgacuggcucaacaaguacagcuacuaccccgaggacccggugaagcuggcguccaucgucaaggccagcuucgaggagggcaagugcgggcugaacuccguggacagccucgagcacgagauguggcgcucccgggccgacgagaucaacgccaucuucgaggagaacgagguggacaucagcgucguggugcaggaccccaagaacgucuaccagcgcggcacccaccccuucucccggauccgcgacgggcugcaguacggcuggaagaccugggggaagaaccugguguucagccccggccggaagaacggcuccuucaucaucgacggcaagagccgcaaggagugcccguucuccaaccggguguggaacagcuuccagaucgaggaguucgggacgggggucuucaccacccgcguguacauggacgccguguucgaguacaccaucgacugcgacggcuccauccucggcgcggccgucaacgggaagaaguccgcccacggcagccccacguucuggauggggagccacgaggugaacggcaccuggaugauccacacccuggaggcccuggacuacaaggagugcgaguggccccucacccacacgaucgggaccagcguggaggaguccgagauguucaugccccggagcaucggcggcccggucuccagccacaaccacauccccggguacaaggugcagaccaacggccccuggaugcaggucccccuggaggugaagcgcgaggcgugcccggggaccuccgugaucaucgacggcaacugcgacgggcggggcaagagcacgcgcuccaccaccgacagcggcaaggugauccccgaguggugcugccgguccugcaccaugccgcccgucagcuuccacggguccgacggcugcugguaccccauggagauccgcccccggaagacgcacgagagccaccuggugcgcuccugggucaccgccugaggacuagucccuguucccagagcccacuuuuuuuucuuuuuuugaaauaaaauagccugucuuucagaucucaaaggcucuuuucagagccaccaaaaaaaaaaaaaaaaaaaaaaaaaaaaaaaaaaaaaaaaaaaaaaaaaaaaaaaaaaaaaaaaaaaaaaaaaaaaaaaaaaaaaaaaaaaaaaaaaaaaa

SEQ ID NO: 2572 - RNA, 1385 nt, Artificial Sequence
  mRNA product Design a-1 (hSL-A100) comprising derived and/or modified sequence from YFV__NC_002031.1__SSIgE-NS1 (polyprotein: aa779-1130) (opt1)
gggagagucccgcagucggcguccagcggcucugcuuguucgugugugugucguugcaggccuuauucaagcuuaccauggacuggaccuggauccuguuccucguggccgccgcgacccgcguccacagcgaccaggggugcgccaucaacuucggcaagcgcgagcugaagugcggggacggcaucuucaucuuccgggacuccgacgacuggcucaacaaguacagcuacuaccccgaggacccggugaagcuggcguccaucgucaaggccagcuucgaggagggcaagugcgggcugaacuccguggacagccucgagcacgagauguggcgcucccgggccgacgagaucaacgccaucuucgaggagaacgagguggacaucagcgucguggugcaggaccccaagaacgucuaccagcgcggcacccaccccuucucccggauccgcgacgggcugcaguacggcuggaagaccugggggaagaaccugguguucagccccggccggaagaacggcuccuucaucaucgacggcaagagccgcaaggagugcccguucuccaaccggguguggaacagcuuccagaucgaggaguucgggacgggggucuucaccacccgcguguacauggacgccguguucgaguacaccaucgacugcgacggcuccauccucggcgcggccgucaacgggaagaaguccgcccacggcagccccacguucuggauggggagccacgaggugaacggcaccuggaugauccacacccuggaggcccuggacuacaaggagugcgaguggccccucacccacacgaucgggaccagcguggaggaguccgagauguucaugccccggagcaucggcggcccggucuccagccacaaccacauccccggguacaaggugcagaccaacggccccuggaugcaggucccccuggaggugaagcgcgaggcgugcccggggaccuccgugaucaucgacggcaacugcgacgggcggggcaagagcacgcgcuccaccaccgacagcggcaaggugauccccgaguggugcugccgguccugcaccaugccgcccgucagcuuccacggguccgacggcugcugguaccccauggagauccgcccccggaagacgcacgagagccaccuggugcgcuccugggucaccgccugaggacuagucccuguucccagagcccacuuuuuuuucuuuuuuugaaauaaaauagccugucuuucagaucucaaaggcucuuuucagagccaccaaaaaaaaaaaaaaaaaaaaaaaaaaaaaaaaaaaaaaaaaaaaaaaaaaaaaaaaaaaaaaaaaaaaaaaaaaaaaaaaaaaaaaaaaaaaaaaaaaaaa

SEQ ID NO: 2573 - RNA, 1476 nt, Artificial Sequence
  mRNA product Design i-3 (hSL-A100) comprising derived and/or modified sequence from YFV__NC_002031.1__eSS-NS1-Y (polyprotein: aa758-1177) (opt1)
gggagaaagcuuaccaugagcauguccaugauccuggugggcgucaucaugauguuccucagccugggggugggcgccgaccaggggugcgccaucaacuucggcaagcgcgagcugaagugcggggacggcaucuucaucuuccgggacuccgacgacuggcucaacaaguacagcuacuaccccgaggacccggugaagcuggcguccaucgucaaggccagcuucgaggagggcaagugcgggcugaacuccguggacagccucgagcacgagauguggcgcucccgggccgacgagaucaacgccaucuucgaggagaacgagguggacaucagcgucguggugcaggaccccaagaacgucuaccagcgcggcacccaccccuucucccggauccgcgacgggcugcaguacggcuggaagaccugggggaagaaccugguguucagccccggccggaagaacggcuccuucaucaucgacggcaagagccgcaaggagugcccguucuccaaccggguguggaacagcuuccagaucgaggaguucgggacgggggucuucaccacccgcguguacauggacgccguguucgaguacaccaucgacugcgacggcuccauccucggcgcggccgucaacgggaagaaguccgcccacggcagccccacguucuggauggggagccacgaggugaacggcaccuggaugauccacacccuggaggcccuggacuacaaggagugcgaguggccccucacccacacgaucgggaccagcguggaggaguccgagauguucaugccccggagcaucggcggcccggucuccagccacaaccacauccccggguacaaggugcagaccaacggccccuggaugcaggucccccuggaggugaagcgcgaggcgugcccggggaccuccgugaucaucgacggcaacugcgacgggcggggcaagagcacgcgcuccaccaccgacagcggcaaggugauccccgaguggugcugccgguccugcaccaugccgcccgucagcuuccacggguccgacggcugcugguaccccauggagauccgcccccggaagacgcacgagagccaccuggugcgcuccugggucaccgccggggagauccacgccgugcccuucggccucgugagcaugaugaucgccauggaggucgugcugcggaagcgccaggggcccaagcagaugcuggugggcggcgucgugcuccugggggccaugcuggugggccaggucaccugaggacuaguuauaagacugacuagcccgaugggccucccaacgggcccuccuccccuccuugcaccgagauuaaucaaaggcucuuuucagagccaccaaaaaaaaaaaaaaaaaaaaaaaaaaaaaaaaaaaaaaaaaaaaaaaaaaaaaaaaaaaaaaaaaaaaaaaaaaaaaaaaaaaaaaaaaaaaaaaaaaaaa

SEQ ID NO: 2574 - RNA, 1335 nt, Artificial Sequence
  mRNA product Design i-3 (hSL-A100) comprising derived and/or modified sequence from YFV__NC_002031.1__eSS-NS1 (polyprotein: aa758-1130) (opt1)
gggagaaagcuuaccaugagcauguccaugauccuggugggcgucaucaugauguuccucagccugggggugggcgccgaccaggggugcgccaucaacuucggcaagcgcgagcugaagugcggggacggcaucuucaucuuccgggacuccgacgacuggcucaacaaguacagcuacuaccccgaggacccggugaagcuggcguccaucgucaaggccagcuucgaggagggcaagugcgggcugaacuccguggacagccucgagcacgagauguggcgcucccgggccgacgagaucaacgccaucuucgaggagaacgagguggacaucagcgucguggugcaggaccccaagaacgucuaccagcgcggcacccaccccuucucccggauccgcgacgggcugcaguacggcuggaagaccugggggaagaaccugguguucagccccggccggaagaacggcuccuucaucaucgacggcaagagccgcaaggagugcccguucuccaaccggguguggaacagcuuccagaucgaggaguucgggacgggggucuucaccacccgcguguacauggacgccguguucgaguacaccaucgacugcgacggcuccauccucggcgcggccgucaacgggaagaaguccgcccacggcagccccacguucuggauggggagccacgaggugaacggcaccuggaugauccacacccuggaggcccuggacuacaaggagugcgaguggccccucacccacacgaucgggaccagcguggaggaguccgagauguucaugccccggagcaucggcggcccggucuccagccacaaccacauccccggguacaaggugcagaccaacggccccuggaugcaggucccccuggaggugaagcgcgaggcgugcccggggaccuccgugaucaucgacggcaacugcgacgggcggggcaagagcacgcgcuccaccaccgacagcggcaaggugauccccgaguggugcugccgguccugcaccaugccgcccgucagcuuccacggguccgacggcugcugguaccccauggagauccgcccccggaagacgcacgagagccaccuggugcgcuccugggucaccgccugaggacuaguuauaagacugacuagcccgaugggccucccaacgggcccuccuccccuccuugcaccgagauuaaucaaaggcucuuuucagagccaccaaaaaaaaaaaaaaaaaaaaaaaaaaaaaaaaaaaaaaaaaaaaaaaaaaaaaaaaaaaaaaaaaaaaaaaaaaaaaaaaaaaaaaaaaaaaaaaaaaaaa

SEQ ID NO: 2575 - RNA, 1326 nt, Artificial Sequence
  mRNA product Design i-3 (hSL-A100) comprising derived and/or modified sequence from YFV__NC_002031.1__SSIgE-NS1 (polyprotein: aa779-1130) (opt1)
gggagaaagcuuaccauggacuggaccuggauccuguuccucguggccgccgcgacccgcguccacagcgaccaggggugcgccaucaacuucggcaagcgcgagcugaagugcggggacggcaucuucaucuuccgggacuccgacgacuggcucaacaaguacagcuacuaccccgaggacccggugaagcuggcguccaucgucaaggccagcuucgaggagggcaagugcgggcugaacuccguggacagccucgagcacgagauguggcgcucccgggccgacgagaucaacgccaucuucgaggagaacgagguggacaucagcgucguggugcaggaccccaagaacgucuaccagcgcggcacccaccccuucucccggauccgcgacgggcugcaguacggcuggaagaccugggggaagaaccugguguucagccccggccggaagaacggcuccuucaucaucgacggcaagagccgcaaggagugcccguucuccaaccggguguggaacagcuuccagaucgaggaguucgggacgggggucuucaccacccgcguguacauggacgccguguucgaguacaccaucgacugcgacggcuccauccucggcgcggccgucaacgggaagaaguccgcccacggcagccccacguucuggauggggagccacgaggugaacggcaccuggaugauccacacccuggaggcccuggacuacaaggagugcgaguggccccucacccacacgaucgggaccagcguggaggaguccgagauguucaugccccggagcaucggcggcccggucuccagccacaaccacauccccggguacaaggugcagaccaacggccccuggaugcaggucccccuggaggugaagcgcgaggcgugcccggggaccuccgugaucaucgacggcaacugcgacgggcggggcaagagcacgcgcuccaccaccgacagcggcaaggugauccccgaguggugcugccgguccugcaccaugccgcccgucagcuuccacggguccgacggcugcugguaccccauggagauccgcccccggaagacgcacgagagccaccuggugcgcuccugggucaccgccugaggacuaguuauaagacugacuagcccgaugggccucccaacgggcccuccuccccuccuugcaccgagauuaaucaaaggcucuuuucagagccaccaaaaaaaaaaaaaaaaaaaaaaaaaaaaaaaaaaaaaaaaaaaaaaaaaaaaaaaaaaaaaaaaaaaaaaaaaaaaaaaaaaaaaaaaaaaaaaaaaaaaa

SEQ ID NO: 2576 - RNA, 1504 nt, Artificial Sequence
  mRNA product Design a-1 (hSL-A64-N5) comprising derived and/or modified sequence from YFV__NC_002031.1__eSS-NS1-Y (polyprotein: aa758-1177) (opt1)
aggagagucccgcagucggcguccagcggcucugcuuguucgugugugugucguugcaggccuuauucaagcuuaccaugagcauguccaugauccuggugggcgucaucaugauguuccucagccugggggugggcgccgaccaggggugcgccaucaacuucggcaagcgcgagcugaagugcggggacggcaucuucaucuuccgggacuccgacgacuggcucaacaaguacagcuacuaccccgaggacccggugaagcuggcguccaucgucaaggccagcuucgaggagggcaagugcgggcugaacuccguggacagccucgagcacgagauguggcgcucccgggccgacgagaucaacgccaucuucgaggagaacgagguggacaucagcgucguggugcaggaccccaagaacgucuaccagcgcggcacccaccccuucucccggauccgcgacgggcugcaguacggcuggaagaccugggggaagaaccugguguucagccccggccggaagaacggcuccuucaucaucgacggcaagagccgcaaggagugcccguucuccaaccggguguggaacagcuuccagaucgaggaguucgggacgggggucuucaccacccgcguguacauggacgccguguucgaguacaccaucgacugcgacggcuccauccucggcgcggccgucaacgggaagaaguccgcccacggcagccccacguucuggauggggagccacgaggugaacggcaccuggaugauccacacccuggaggcccuggacuacaaggagugcgaguggccccucacccacacgaucgggaccagcguggaggaguccgagauguucaugccccggagcaucggcggcccggucuccagccacaaccacauccccggguacaaggugcagaccaacggccccuggaugcaggucccccuggaggugaagcgcgaggcgugcccggggaccuccgugaucaucgacggcaacugcgacgggcggggcaagagcacgcgcuccaccaccgacagcggcaaggugauccccgaguggugcugccgguccugcaccaugccgcccgucagcuuccacggguccgacggcugcugguaccccauggagauccgcccccggaagacgcacgagagccaccuggugcgcuccugggucaccgccggggagauccacgccgugcccuucggccucgugagcaugaugaucgccauggaggucgugcugcggaagcgccaggggcccaagcagaugcuggugggcggcgucgugcuccugggggccaugcuggugggccaggucaccugaggacuagucccuguucccagagcccacuuuuuuuucuuuuuuugaaauaaaauagccugucuuucagaucucaaaggcucuuuucagagccaccaaaaaaaaaaaaaaaaaaaaaaaaaaaaaaaaaaaaaaaaaaaaaaaaaaaaaaaaaaaaaaaaagaauu

SEQ ID NO: 2577 - RNA, 1363 nt, Artificial Sequence
  mRNA product Design a-1 (hSL-A64-N5) comprising derived and/or modified sequence from YFV__NC_002031.1__eSS-NS1 (polyprotein: aa758-1130) (opt1)
aggagagucccgcagucggcguccagcggcucugcuuguucgugugugugucguugcaggccuuauucaagcuuaccaugagcauguccaugauccuggugggcgucaucaugauguuccucagccugggggugggcgccgaccaggggugcgccaucaacuucggcaagcgcgagcugaagugcggggacggcaucuucaucuuccgggacuccgacgacuggcucaacaaguacagcuacuaccccgaggacccggugaagcuggcguccaucgucaaggccagcuucgaggagggcaagugcgggcugaacuccguggacagccucgagcacgagauguggcgcucccgggccgacgagaucaacgccaucuucgaggagaacgagguggacaucagcgucguggugcaggaccccaagaacgucuaccagcgcggcacccaccccuucucccggauccgcgacgggcugcaguacggcuggaagaccugggggaagaaccugguguucagccccggccggaagaacggcuccuucaucaucgacggcaagagccgcaaggagugcccguucuccaaccggguguggaacagcuuccagaucgaggaguucgggacgggggucuucaccacccgcguguacauggacgccguguucgaguacaccaucgacugcgacggcuccauccucggcgcggccgucaacgggaagaaguccgcccacggcagccccacguucuggauggggagccacgaggugaacggcaccuggaugauccacacccuggaggcccuggacuacaaggagugcgaguggccccucacccacacgaucgggaccagcguggaggaguccgagauguucaugccccggagcaucggcggcccggucuccagccacaaccacauccccggguacaaggugcagaccaacggccccuggaugcaggucccccuggaggugaagcgcgaggcgugcccggggaccuccgugaucaucgacggcaacugcgacgggcggggcaagagcacgcgcuccaccaccgacagcggcaaggugauccccgaguggugcugccgguccugcaccaugccgcccgucagcuuccacggguccgacggcugcugguaccccauggagauccgcccccggaagacgcacgagagccaccuggugcgcuccugggucaccgccugaggacuagucccuguucccagagcccacuuuuuuuucuuuuuuugaaauaaaauagccugucuuucagaucucaaaggcucuuuucagagccaccaaaaaaaaaaaaaaaaaaaaaaaaaaaaaaaaaaaaaaaaaaaaaaaaaaaaaaaaaaaaaaaaagaauu

SEQ ID NO: 2578 - RNA, 1354 nt, Artificial Sequence
  mRNA product Design a-1 (hSL-A64-N5) comprising derived and/or modified sequence from YFV__NC_002031.1__SSIgE-NS1 (polyprotein: aa779-1130) (opt1)
aggagagucccgcagucggcguccagcggcucugcuuguucgugugugugucguugcaggccuuauucaagcuuaccauggacuggaccuggauccuguuccucguggccgccgcgacccgcguccacagcgaccaggggugcgccaucaacuucggcaagcgcgagcugaagugcggggacggcaucuucaucuuccgggacuccgacgacuggcucaacaaguacagcuacuaccccgaggacccggugaagcuggcguccaucgucaaggccagcuucgaggagggcaagugcgggcugaacuccguggacagccucgagcacgagauguggcgcucccgggccgacgagaucaacgccaucuucgaggagaacgagguggacaucagcgucguggugcaggaccccaagaacgucuaccagcgcggcacccaccccuucucccggauccgcgacgggcugcaguacggcuggaagaccugggggaagaaccugguguucagccccggccggaagaacggcuccuucaucaucgacggcaagagccgcaaggagugcccguucuccaaccggguguggaacagcuuccagaucgaggaguucgggacgggggucuucaccacccgcguguacauggacgccguguucgaguacaccaucgacugcgacggcuccauccucggcgcggccgucaacgggaagaaguccgcccacggcagccccacguucuggauggggagccacgaggugaacggcaccuggaugauccacacccuggaggcccuggacuacaaggagugcgaguggccccucacccacacgaucgggaccagcguggaggaguccgagauguucaugccccggagcaucggcggcccggucuccagccacaaccacauccccggguacaaggugcagaccaacggccccuggaugcaggucccccuggaggugaagcgcgaggcgugcccggggaccuccgugaucaucgacggcaacugcgacgggcggggcaagagcacgcgcuccaccaccgacagcggcaaggugauccccgaguggugcugccgguccugcaccaugccgcccgucagcuuccacggguccgacggcugcugguaccccauggagauccgcccccggaagacgcacgagagccaccuggugcgcuccugggucaccgccugaggacuagucccuguucccagagcccacuuuuuuuucuuuuuuugaaauaaaauagccugucuuucagaucucaaaggcucuuuucagagccaccaaaaaaaaaaaaaaaaaaaaaaaaaaaaaaaaaaaaaaaaaaaaaaaaaaaaaaaaaaaaaaaaagaauu

SEQ ID NO: 2579 - RNA, 1445 nt, Artificial Sequence
  mRNA product Design i-3 (hSL-A64-N5) comprising derived and/or modified sequence from YFV__NC_002031.1__eSS-NS1-Y (polyprotein: aa758-1177) (opt1) R8501/R8502
aggagaaagcuuaccaugagcauguccaugauccuggugggcgucaucaugauguuccucagccugggggugggcgccgaccaggggugcgccaucaacuucggcaagcgcgagcugaagugcggggacggcaucuucaucuuccgggacuccgacgacuggcucaacaaguacagcuacuaccccgaggacccggugaagcuggcguccaucgucaaggccagcuucgaggagggcaagugcgggcugaacuccguggacagccucgagcacgagauguggcgcucccgggccgacgagaucaacgccaucuucgaggagaacgagguggacaucagcgucguggugcaggaccccaagaacgucuaccagcgcggcacccaccccuucucccggauccgcgacgggcugcaguacggcuggaagaccugggggaagaaccugguguucagccccggccggaagaacggcuccuucaucaucgacggcaagagccgcaaggagugcccguucuccaaccggguguggaacagcuuccagaucgaggaguucgggacgggggucuucaccacccgcguguacauggacgccguguucgaguacaccaucgacugcgacggcuccauccucggcgcggccgucaacgggaagaaguccgcccacggcagccccacguucuggauggggagccacgaggugaacggcaccuggaugauccacacccuggaggcccuggacuacaaggagugcgaguggccccucacccacacgaucgggaccagcguggaggaguccgagauguucaugccccggagcaucggcggcccggucuccagccacaaccacauccccggguacaaggugcagaccaacggccccuggaugcaggucccccuggaggugaagcgcgaggcgugcccggggaccuccgugaucaucgacggcaacugcgacgggcggggcaagagcacgcgcuccaccaccgacagcggcaaggugauccccgaguggugcugccgguccugcaccaugccgcccgucagcuuccacggguccgacggcugcugguaccccauggagauccgcccccggaagacgcacgagagccaccuggugcgcuccugggucaccgccggggagauccacgccgugcccuucggccucgugagcaugaugaucgccauggaggucgugcugcggaagcgccaggggcccaagcagaugcuggugggcggcgucgugcuccugggggccaugcuggugggccaggucaccugaggacuaguuauaagacugacuagcccgaugggccucccaacgggcccuccuccccuccuugcaccgagauuaaucaaaggcucuuuucagagccaccaaaaaaaaaaaaaaaaaaaaaaaaaaaaaaaaaaaaaaaaaaaaaaaaaaaaaaaaaaaaaaaaagaauu

SEQ ID NO: 2580 - RNA, 1304 nt, Artificial Sequence
  mRNA product Design i-3 (hSL-A64-N5) comprising derived and/or modified sequence from YFV__NC_002031.1__eSS-NS1 (polyprotein: aa758-1130) (opt1) R8504/R8505
aggagaaagcuuaccaugagcauguccaugauccuggugggcgucaucaugauguuccucagccugggggugggcgccgaccaggggugcgccaucaacuucggcaagcgcgagcugaagugcggggacggcaucuucaucuuccgggacuccgacgacuggcucaacaaguacagcuacuaccccgaggacccggugaagcuggcguccaucgucaaggccagcuucgaggagggcaagugcgggcugaacuccguggacagccucgagcacgagauguggcgcucccgggccgacgagaucaacgccaucuucgaggagaacgagguggacaucagcgucguggugcaggaccccaagaacgucuaccagcgcggcacccaccccuucucccggauccgcgacgggcugcaguacggcuggaagaccugggggaagaaccugguguucagccccggccggaagaacggcuccuucaucaucgacggcaagagccgcaaggagugcccguucuccaaccggguguggaacagcuuccagaucgaggaguucgggacgggggucuucaccacccgcguguacauggacgccguguucgaguacaccaucgacugcgacggcuccauccucggcgcggccgucaacgggaagaaguccgcccacggcagccccacguucuggauggggagccacgaggugaacggcaccuggaugauccacacccuggaggcccuggacuacaaggagugcgaguggccccucacccacacgaucgggaccagcguggaggaguccgagauguucaugccccggagcaucggcggcccggucuccagccacaaccacauccccggguacaaggugcagaccaacggccccuggaugcaggucccccuggaggugaagcgcgaggcgugcccggggaccuccgugaucaucgacggcaacugcgacgggcggggcaagagcacgcgcuccaccaccgacagcggcaaggugauccccgaguggugcugccgguccugcaccaugccgcccgucagcuuccacggguccgacggcugcugguaccccauggagauccgcccccggaagacgcacgagagccaccuggugcgcuccugggucaccgccugaggacuaguuauaagacugacuagcccgaugggccucccaacgggcccuccuccccuccuugcaccgagauuaaucaaaggcucuuuucagagccaccaaaaaaaaaaaaaaaaaaaaaaaaaaaaaaaaaaaaaaaaaaaaaaaaaaaaaaaaaaaaaaaaagaauu

SEQ ID NO: 2581 - RNA, 1295 nt, Artificial Sequence
  mRNA product Design i-3 (hSL-A64-N5) comprising derived and/or modified sequence from YFV__NC_002031.1__SSIgE-NS1 (polyprotein: aa779-1130) (opt1) R8507/R8508
aggagaaagcuuaccauggacuggaccuggauccuguuccucguggccgccgcgacccgcguccacagcgaccaggggugcgccaucaacuucggcaagcgcgagcugaagugcggggacggcaucuucaucuuccgggacuccgacgacuggcucaacaaguacagcuacuaccccgaggacccggugaagcuggcguccaucgucaaggccagcuucgaggagggcaagugcgggcugaacuccguggacagccucgagcacgagauguggcgcucccgggccgacgagaucaacgccaucuucgaggagaacgagguggacaucagcgucguggugcaggaccccaagaacgucuaccagcgcggcacccaccccuucucccggauccgcgacgggcugcaguacggcuggaagaccugggggaagaaccugguguucagccccggccggaagaacggcuccuucaucaucgacggcaagagccgcaaggagugcccguucuccaaccggguguggaacagcuuccagaucgaggaguucgggacgggggucuucaccacccgcguguacauggacgccguguucgaguacaccaucgacugcgacggcuccauccucggcgcggccgucaacgggaagaaguccgcccacggcagccccacguucuggauggggagccacgaggugaacggcaccuggaugauccacacccuggaggcccuggacuacaaggagugcgaguggccccucacccacacgaucgggaccagcguggaggaguccgagauguucaugccccggagcaucggcggcccggucuccagccacaaccacauccccggguacaaggugcagaccaacggccccuggaugcaggucccccuggaggugaagcgcgaggcgugcccggggaccuccgugaucaucgacggcaacugcgacgggcggggcaagagcacgcgcuccaccaccgacagcggcaaggugauccccgaguggugcugccgguccugcaccaugccgcccgucagcuuccacggguccgacggcugcugguaccccauggagauccgcccccggaagacgcacgagagccaccuggugcgcuccugggucaccgccugaggacuaguuauaagacugacuagcccgaugggccucccaacgggcccuccuccccuccuugcaccgagauuaaucaaaggcucuuuucagagccaccaaaaaaaaaaaaaaaaaaaaaaaaaaaaaaaaaaaaaaaaaaaaaaaaaaaaaaaaaaaaaaaaagaauu

SEQ ID NO: 2582 - RNA, 1515 nt, Artificial Sequence
  mRNA product Design a-1 (A64-N5-hSL-N5) comprising derived and/or modified sequence from YFV__NC_002031.1__eSS-NS1-Y (polyprotein: aa758-1177) (opt1)
aggagagucccgcagucggcguccagcggcucugcuuguucgugugugugucguugcaggccuuauucaagcuuaccaugagcauguccaugauccuggugggcgucaucaugauguuccucagccugggggugggcgccgaccaggggugcgccaucaacuucggcaagcgcgagcugaagugcggggacggcaucuucaucuuccgggacuccgacgacuggcucaacaaguacagcuacuaccccgaggacccggugaagcuggcguccaucgucaaggccagcuucgaggagggcaagugcgggcugaacuccguggacagccucgagcacgagauguggcgcucccgggccgacgagaucaacgccaucuucgaggagaacgagguggacaucagcgucguggugcaggaccccaagaacgucuaccagcgcggcacccaccccuucucccggauccgcgacgggcugcaguacggcuggaagaccugggggaagaaccugguguucagccccggccggaagaacggcuccuucaucaucgacggcaagagccgcaaggagugcccguucuccaaccggguguggaacagcuuccagaucgaggaguucgggacgggggucuucaccacccgcguguacauggacgccguguucgaguacaccaucgacugcgacggcuccauccucggcgcggccgucaacgggaagaaguccgcccacggcagccccacguucuggauggggagccacgaggugaacggcaccuggaugauccacacccuggaggcccuggacuacaaggagugcgaguggccccucacccacacgaucgggaccagcguggaggaguccgagauguucaugccccggagcaucggcggcccggucuccagccacaaccacauccccggguacaaggugcagaccaacggccccuggaugcaggucccccuggaggugaagcgcgaggcgugcccggggaccuccgugaucaucgacggcaacugcgacgggcggggcaagagcacgcgcuccaccaccgacagcggcaaggugauccccgaguggugcugccgguccugcaccaugccgcccgucagcuuccacggguccgacggcugcugguaccccauggagauccgcccccggaagacgcacgagagccaccuggugcgcuccugggucaccgccggggagauccacgccgugcccuucggccucgugagcaugaugaucgccauggaggucgugcugcggaagcgccaggggcccaagcagaugcuggugggcggcgucgugcuccugggggccaugcuggugggccaggucaccugaggacuagucccuguucccagagcccacuuuuuuuucuuuuuuugaaauaaaauagccugucuuucauuaauagaucuaaaaaaaaaaaaaaaaaaaaaaaaaaaaaaaaaaaaaaaaaaaaaaaaaaaaaaaaaaaaaaaaugcaucaaaggcucuuuucagagccaccagaauu

SEQ ID NO: 2583 - RNA, 1374 nt, Artificial Sequence
  mRNA product Design a-1 (A64-N5-hSL-N5) comprising derived and/or modified sequence from YFV__NC_002031.1__eSS-NS1 (polyprotein: aa758-1130) (opt1)
aggagagucccgcagucggcguccagcggcucugcuuguucgugugugugucguugcaggccuuauucaagcuuaccaugagcauguccaugauccuggugggcgucaucaugauguuccucagccugggggugggcgccgaccaggggugcgccaucaacuucggcaagcgcgagcugaagugcggggacggcaucuucaucuuccgggacuccgacgacuggcucaacaaguacagcuacuaccccgaggacccggugaagcuggcguccaucgucaaggccagcuucgaggagggcaagugcgggcugaacuccguggacagccucgagcacgagauguggcgcucccgggccgacgagaucaacgccaucuucgaggagaacgagguggacaucagcgucguggugcaggaccccaagaacgucuaccagcgcggcacccaccccuucucccggauccgcgacgggcugcaguacggcuggaagaccugggggaagaaccugguguucagccccggccggaagaacggcuccuucaucaucgacggcaagagccgcaaggagugcccguucuccaaccggguguggaacagcuuccagaucgaggaguucgggacgggggucuucaccacccgcguguacauggacgccguguucgaguacaccaucgacugcgacggcuccauccucggcgcggccgucaacgggaagaaguccgcccacggcagccccacguucuggauggggagccacgaggugaacggcaccuggaugauccacacccuggaggcccuggacuacaaggagugcgaguggccccucacccacacgaucgggaccagcguggaggaguccgagauguucaugccccggagcaucggcggcccggucuccagccacaaccacauccccggguacaaggugcagaccaacggccccuggaugcaggucccccuggaggugaagcgcgaggcgugcccggggaccuccgugaucaucgacggcaacugcgacgggcggggcaagagcacgcgcuccaccaccgacagcggcaaggugauccccgaguggugcugccgguccugcaccaugccgcccgucagcuuccacggguccgacggcugcugguaccccauggagauccgcccccggaagacgcacgagagccaccuggugcgcuccugggucaccgccugaggacuagucccuguucccagagcccacuuuuuuuucuuuuuuugaaauaaaauagccugucuuucauuaauagaucuaaaaaaaaaaaaaaaaaaaaaaaaaaaaaaaaaaaaaaaaaaaaaaaaaaaaaaaaaaaaaaaaugcaucaaaggcucuuuucagagccaccagaauu

SEQ ID NO: 2584 - RNA, 1365 nt, Artificial Sequence
  mRNA product Design a-1 (A64-N5-hSL-N5) comprising derived and/or modified sequence from YFV__NC_002031.1__SSIgE-NS1 (polyprotein: aa779-1130) (opt1)
aggagagucccgcagucggcguccagcggcucugcuuguucgugugugugucguugcaggccuuauucaagcuuaccauggacuggaccuggauccuguuccucguggccgccgcgacccgcguccacagcgaccaggggugcgccaucaacuucggcaagcgcgagcugaagugcggggacggcaucuucaucuuccgggacuccgacgacuggcucaacaaguacagcuacuaccccgaggacccggugaagcuggcguccaucgucaaggccagcuucgaggagggcaagugcgggcugaacuccguggacagccucgagcacgagauguggcgcucccgggccgacgagaucaacgccaucuucgaggagaacgagguggacaucagcgucguggugcaggaccccaagaacgucuaccagcgcggcacccaccccuucucccggauccgcgacgggcugcaguacggcuggaagaccugggggaagaaccugguguucagccccggccggaagaacggcuccuucaucaucgacggcaagagccgcaaggagugcccguucuccaaccggguguggaacagcuuccagaucgaggaguucgggacgggggucuucaccacccgcguguacauggacgccguguucgaguacaccaucgacugcgacggcuccauccucggcgcggccgucaacgggaagaaguccgcccacggcagccccacguucuggauggggagccacgaggugaacggcaccuggaugauccacacccuggaggcccuggacuacaaggagugcgaguggccccucacccacacgaucgggaccagcguggaggaguccgagauguucaugccccggagcaucggcggcccggucuccagccacaaccacauccccggguacaaggugcagaccaacggccccuggaugcaggucccccuggaggugaagcgcgaggcgugcccggggaccuccgugaucaucgacggcaacugcgacgggcggggcaagagcacgcgcuccaccaccgacagcggcaaggugauccccgaguggugcugccgguccugcaccaugccgcccgucagcuuccacggguccgacggcugcugguaccccauggagauccgcccccggaagacgcacgagagccaccuggugcgcuccugggucaccgccugaggacuagucccuguucccagagcccacuuuuuuuucuuuuuuugaaauaaaauagccugucuuucauuaauagaucuaaaaaaaaaaaaaaaaaaaaaaaaaaaaaaaaaaaaaaaaaaaaaaaaaaaaaaaaaaaaaaaaugcaucaaaggcucuuuucagagccaccagaauu

SEQ ID NO: 2585 - RNA, 1456 nt, Artificial Sequence
  mRNA product Design i-3 (A64-N5-hSL-N5) comprising derived and/or modified sequence from YFV__NC_002031.1__eSS-NS1-Y (polyprotein: aa758-1177) (opt1)
aggagaaagcuuaccaugagcauguccaugauccuggugggcgucaucaugauguuccucagccugggggugggcgccgaccaggggugcgccaucaacuucggcaagcgcgagcugaagugcggggacggcaucuucaucuuccgggacuccgacgacuggcucaacaaguacagcuacuaccccgaggacccggugaagcuggcguccaucgucaaggccagcuucgaggagggcaagugcgggcugaacuccguggacagccucgagcacgagauguggcgcucccgggccgacgagaucaacgccaucuucgaggagaacgagguggacaucagcgucguggugcaggaccccaagaacgucuaccagcgcggcacccaccccuucucccggauccgcgacgggcugcaguacggcuggaagaccugggggaagaaccugguguucagccccggccggaagaacggcuccuucaucaucgacggcaagagccgcaaggagugcccguucuccaaccggguguggaacagcuuccagaucgaggaguucgggacgggggucuucaccacccgcguguacauggacgccguguucgaguacaccaucgacugcgacggcuccauccucggcgcggccgucaacgggaagaaguccgcccacggcagccccacguucuggauggggagccacgaggugaacggcaccuggaugauccacacccuggaggcccuggacuacaaggagugcgaguggccccucacccacacgaucgggaccagcguggaggaguccgagauguucaugccccggagcaucggcggcccggucuccagccacaaccacauccccggguacaaggugcagaccaacggccccuggaugcaggucccccuggaggugaagcgcgaggcgugcccggggaccuccgugaucaucgacggcaacugcgacgggcggggcaagagcacgcgcuccaccaccgacagcggcaaggugauccccgaguggugcugccgguccugcaccaugccgcccgucagcuuccacggguccgacggcugcugguaccccauggagauccgcccccggaagacgcacgagagccaccuggugcgcuccugggucaccgccggggagauccacgccgugcccuucggccucgugagcaugaugaucgccauggaggucgugcugcggaagcgccaggggcccaagcagaugcuggugggcggcgucgugcuccugggggccaugcuggugggccaggucaccugaggacuaguuauaagacugacuagcccgaugggccucccaacgggcccuccuccccuccuugcaccgagauuaauagaucuaaaaaaaaaaaaaaaaaaaaaaaaaaaaaaaaaaaaaaaaaaaaaaaaaaaaaaaaaaaaaaaaugcaucaaaggcucuuuucagagccaccagaauu

SEQ ID NO: 2586 - RNA, 1315 nt, Artificial Sequence
  mRNA product Design i-3 (A64-N5-hSL-N5) comprising derived and/or modified sequence from YFV__NC_002031.1__eSS-NS1 (polyprotein: aa758-1130) (opt1)
aggagaaagcuuaccaugagcauguccaugauccuggugggcgucaucaugauguuccucagccugggggugggcgccgaccaggggugcgccaucaacuucggcaagcgcgagcugaagugcggggacggcaucuucaucuuccgggacuccgacgacuggcucaacaaguacagcuacuaccccgaggacccggugaagcuggcguccaucgucaaggccagcuucgaggagggcaagugcgggcugaacuccguggacagccucgagcacgagauguggcgcucccgggccgacgagaucaacgccaucuucgaggagaacgagguggacaucagcgucguggugcaggaccccaagaacgucuaccagcgcggcacccaccccuucucccggauccgcgacgggcugcaguacggcuggaagaccugggggaagaaccugguguucagccccggccggaagaacggcuccuucaucaucgacggcaagagccgcaaggagugcccguucuccaaccggguguggaacagcuuccagaucgaggaguucgggacgggggucuucaccacccgcguguacauggacgccguguucgaguacaccaucgacugcgacggcuccauccucggcgcggccgucaacgggaagaaguccgcccacggcagccccacguucuggauggggagccacgaggugaacggcaccuggaugauccacacccuggaggcccuggacuacaaggagugcgaguggccccucacccacacgaucgggaccagcguggaggaguccgagauguucaugccccggagcaucggcggcccggucuccagccacaaccacauccccggguacaaggugcagaccaacggccccuggaugcaggucccccuggaggugaagcgcgaggcgugcccggggaccuccgugaucaucgacggcaacugcgacgggcggggcaagagcacgcgcuccaccaccgacagcggcaaggugauccccgaguggugcugccgguccugcaccaugccgcccgucagcuuccacggguccgacggcugcugguaccccauggagauccgcccccggaagacgcacgagagccaccuggugcgcuccugggucaccgccugaggacuaguuauaagacugacuagcccgaugggccucccaacgggcccuccuccccuccuugcaccgagauuaauagaucuaaaaaaaaaaaaaaaaaaaaaaaaaaaaaaaaaaaaaaaaaaaaaaaaaaaaaaaaaaaaaaaaugcaucaaaggcucuuuucagagccaccagaauu

SEQ ID NO: 2587 - RNA, 1306 nt, Artificial Sequence
  mRNA product Design i-3 (A64-N5-hSL-N5) comprising derived and/or modified sequence from YFV__NC_002031.1__SSIgE-NS1 (polyprotein: aa779-1130) (opt1)
aggagaaagcuuaccauggacuggaccuggauccuguuccucguggccgccgcgacccgcguccacagcgaccaggggugcgccaucaacuucggcaagcgcgagcugaagugcggggacggcaucuucaucuuccgggacuccgacgacuggcucaacaaguacagcuacuaccccgaggacccggugaagcuggcguccaucgucaaggccagcuucgaggagggcaagugcgggcugaacuccguggacagccucgagcacgagauguggcgcucccgggccgacgagaucaacgccaucuucgaggagaacgagguggacaucagcgucguggugcaggaccccaagaacgucuaccagcgcggcacccaccccuucucccggauccgcgacgggcugcaguacggcuggaagaccugggggaagaaccugguguucagccccggccggaagaacggcuccuucaucaucgacggcaagagccgcaaggagugcccguucuccaaccggguguggaacagcuuccagaucgaggaguucgggacgggggucuucaccacccgcguguacauggacgccguguucgaguacaccaucgacugcgacggcuccauccucggcgcggccgucaacgggaagaaguccgcccacggcagccccacguucuggauggggagccacgaggugaacggcaccuggaugauccacacccuggaggcccuggacuacaaggagugcgaguggccccucacccacacgaucgggaccagcguggaggaguccgagauguucaugccccggagcaucggcggcccggucuccagccacaaccacauccccggguacaaggugcagaccaacggccccuggaugcaggucccccuggaggugaagcgcgaggcgugcccggggaccuccgugaucaucgacggcaacugcgacgggcggggcaagagcacgcgcuccaccaccgacagcggcaaggugauccccgaguggugcugccgguccugcaccaugccgcccgucagcuuccacggguccgacggcugcugguaccccauggagauccgcccccggaagacgcacgagagccaccuggugcgcuccugggucaccgccugaggacuaguuauaagacugacuagcccgaugggccucccaacgggcccuccuccccuccuugcaccgagauuaauagaucuaaaaaaaaaaaaaaaaaaaaaaaaaaaaaaaaaaaaaaaaaaaaaaaaaaaaaaaaaaaaaaaaugcaucaaaggcucuuuucagagccaccagaauu

SEQ ID NO: 2588 - RNA, 1535 nt, Artificial Sequence
  mRNA product Design a-1 (hSL-A100) comprising derived and/or modified sequence from YFV__NC_002031.1__eSS-NS1-Y (polyprotein: aa758-1177) (opt1) R8503
aggagagucccgcagucggcguccagcggcucugcuuguucgugugugugucguugcaggccuuauucaagcuuaccaugagcauguccaugauccuggugggcgucaucaugauguuccucagccugggggugggcgccgaccaggggugcgccaucaacuucggcaagcgcgagcugaagugcggggacggcaucuucaucuuccgggacuccgacgacuggcucaacaaguacagcuacuaccccgaggacccggugaagcuggcguccaucgucaaggccagcuucgaggagggcaagugcgggcugaacuccguggacagccucgagcacgagauguggcgcucccgggccgacgagaucaacgccaucuucgaggagaacgagguggacaucagcgucguggugcaggaccccaagaacgucuaccagcgcggcacccaccccuucucccggauccgcgacgggcugcaguacggcuggaagaccugggggaagaaccugguguucagccccggccggaagaacggcuccuucaucaucgacggcaagagccgcaaggagugcccguucuccaaccggguguggaacagcuuccagaucgaggaguucgggacgggggucuucaccacccgcguguacauggacgccguguucgaguacaccaucgacugcgacggcuccauccucggcgcggccgucaacgggaagaaguccgcccacggcagccccacguucuggauggggagccacgaggugaacggcaccuggaugauccacacccuggaggcccuggacuacaaggagugcgaguggccccucacccacacgaucgggaccagcguggaggaguccgagauguucaugccccggagcaucggcggcccggucuccagccacaaccacauccccggguacaaggugcagaccaacggccccuggaugcaggucccccuggaggugaagcgcgaggcgugcccggggaccuccgugaucaucgacggcaacugcgacgggcggggcaagagcacgcgcuccaccaccgacagcggcaaggugauccccgaguggugcugccgguccugcaccaugccgcccgucagcuuccacggguccgacggcugcugguaccccauggagauccgcccccggaagacgcacgagagccaccuggugcgcuccugggucaccgccggggagauccacgccgugcccuucggccucgugagcaugaugaucgccauggaggucgugcugcggaagcgccaggggcccaagcagaugcuggugggcggcgucgugcuccugggggccaugcuggugggccaggucaccugaggacuagucccuguucccagagcccacuuuuuuuucuuuuuuugaaauaaaauagccugucuuucagaucucaaaggcucuuuucagagccaccaaaaaaaaaaaaaaaaaaaaaaaaaaaaaaaaaaaaaaaaaaaaaaaaaaaaaaaaaaaaaaaaaaaaaaaaaaaaaaaaaaaaaaaaaaaaaaaaaaaaa

SEQ ID NO: 2589 - RNA, 1394 nt, Artificial Sequence
  mRNA product Design a-1 (hSL-A100) comprising derived and/or modified sequence from YFV__NC_002031.1__eSS-NS1 (polyprotein: aa758-1130) (opt1) R8506
aggagagucccgcagucggcguccagcggcucugcuuguucgugugugugucguugcaggccuuauucaagcuuaccaugagcauguccaugauccuggugggcgucaucaugauguuccucagccugggggugggcgccgaccaggggugcgccaucaacuucggcaagcgcgagcugaagugcggggacggcaucuucaucuuccgggacuccgacgacuggcucaacaaguacagcuacuaccccgaggacccggugaagcuggcguccaucgucaaggccagcuucgaggagggcaagugcgggcugaacuccguggacagccucgagcacgagauguggcgcucccgggccgacgagaucaacgccaucuucgaggagaacgagguggacaucagcgucguggugcaggaccccaagaacgucuaccagcgcggcacccaccccuucucccggauccgcgacgggcugcaguacggcuggaagaccugggggaagaaccugguguucagccccggccggaagaacggcuccuucaucaucgacggcaagagccgcaaggagugcccguucuccaaccggguguggaacagcuuccagaucgaggaguucgggacgggggucuucaccacccgcguguacauggacgccguguucgaguacaccaucgacugcgacggcuccauccucggcgcggccgucaacgggaagaaguccgcccacggcagccccacguucuggauggggagccacgaggugaacggcaccuggaugauccacacccuggaggcccuggacuacaaggagugcgaguggccccucacccacacgaucgggaccagcguggaggaguccgagauguucaugccccggagcaucggcggcccggucuccagccacaaccacauccccggguacaaggugcagaccaacggccccuggaugcaggucccccuggaggugaagcgcgaggcgugcccggggaccuccgugaucaucgacggcaacugcgacgggcggggcaagagcacgcgcuccaccaccgacagcggcaaggugauccccgaguggugcugccgguccugcaccaugccgcccgucagcuuccacggguccgacggcugcugguaccccauggagauccgcccccggaagacgcacgagagccaccuggugcgcuccugggucaccgccugaggacuagucccuguucccagagcccacuuuuuuuucuuuuuuugaaauaaaauagccugucuuucagaucucaaaggcucuuuucagagccaccaaaaaaaaaaaaaaaaaaaaaaaaaaaaaaaaaaaaaaaaaaaaaaaaaaaaaaaaaaaaaaaaaaaaaaaaaaaaaaaaaaaaaaaaaaaaaaaaaaaaa

SEQ ID NO: 2590 - RNA, 1385 nt, Artificial Sequence
  mRNA product Design a-1 (hSL-A100) comprising derived and/or modified sequence from YFV__NC_002031.1__SSIgE-NS1 (polyprotein: aa779-1130) (opt1) R8509
aggagagucccgcagucggcguccagcggcucugcuuguucgugugugugucguugcaggccuuauucaagcuuaccauggacuggaccuggauccuguuccucguggccgccgcgacccgcguccacagcgaccaggggugcgccaucaacuucggcaagcgcgagcugaagugcggggacggcaucuucaucuuccgggacuccgacgacuggcucaacaaguacagcuacuaccccgaggacccggugaagcuggcguccaucgucaaggccagcuucgaggagggcaagugcgggcugaacuccguggacagccucgagcacgagauguggcgcucccgggccgacgagaucaacgccaucuucgaggagaacgagguggacaucagcgucguggugcaggaccccaagaacgucuaccagcgcggcacccaccccuucucccggauccgcgacgggcugcaguacggcuggaagaccugggggaagaaccugguguucagccccggccggaagaacggcuccuucaucaucgacggcaagagccgcaaggagugcccguucuccaaccggguguggaacagcuuccagaucgaggaguucgggacgggggucuucaccacccgcguguacauggacgccguguucgaguacaccaucgacugcgacggcuccauccucggcgcggccgucaacgggaagaaguccgcccacggcagccccacguucuggauggggagccacgaggugaacggcaccuggaugauccacacccuggaggcccuggacuacaaggagugcgaguggccccucacccacacgaucgggaccagcguggaggaguccgagauguucaugccccggagcaucggcggcccggucuccagccacaaccacauccccggguacaaggugcagaccaacggccccuggaugcaggucccccuggaggugaagcgcgaggcgugcccggggaccuccgugaucaucgacggcaacugcgacgggcggggcaagagcacgcgcuccaccaccgacagcggcaaggugauccccgaguggugcugccgguccugcaccaugccgcccgucagcuuccacggguccgacggcugcugguaccccauggagauccgcccccggaagacgcacgagagccaccuggugcgcuccugggucaccgccugaggacuagucccuguucccagagcccacuuuuuuuucuuuuuuugaaauaaaauagccugucuuucagaucucaaaggcucuuuucagagccaccaaaaaaaaaaaaaaaaaaaaaaaaaaaaaaaaaaaaaaaaaaaaaaaaaaaaaaaaaaaaaaaaaaaaaaaaaaaaaaaaaaaaaaaaaaaaaaaaaaaaa

SEQ ID NO: 2591 - RNA, 1476 nt, Artificial Sequence
  mRNA product Design i-3 (hSL-A100) comprising derived and/or modified sequence from YFV__NC_002031.1__eSS-NS1-Y (polyprotein: aa758-1177) (opt1)
aggagaaagcuuaccaugagcauguccaugauccuggugggcgucaucaugauguuccucagccugggggugggcgccgaccaggggugcgccaucaacuucggcaagcgcgagcugaagugcggggacggcaucuucaucuuccgggacuccgacgacuggcucaacaaguacagcuacuaccccgaggacccggugaagcuggcguccaucgucaaggccagcuucgaggagggcaagugcgggcugaacuccguggacagccucgagcacgagauguggcgcucccgggccgacgagaucaacgccaucuucgaggagaacgagguggacaucagcgucguggugcaggaccccaagaacgucuaccagcgcggcacccaccccuucucccggauccgcgacgggcugcaguacggcuggaagaccugggggaagaaccugguguucagccccggccggaagaacggcuccuucaucaucgacggcaagagccgcaaggagugcccguucuccaaccggguguggaacagcuuccagaucgaggaguucgggacgggggucuucaccacccgcguguacauggacgccguguucgaguacaccaucgacugcgacggcuccauccucggcgcggccgucaacgggaagaaguccgcccacggcagccccacguucuggauggggagccacgaggugaacggcaccuggaugauccacacccuggaggcccuggacuacaaggagugcgaguggccccucacccacacgaucgggaccagcguggaggaguccgagauguucaugccccggagcaucggcggcccggucuccagccacaaccacauccccggguacaaggugcagaccaacggccccuggaugcaggucccccuggaggugaagcgcgaggcgugcccggggaccuccgugaucaucgacggcaacugcgacgggcggggcaagagcacgcgcuccaccaccgacagcggcaaggugauccccgaguggugcugccgguccugcaccaugccgcccgucagcuuccacggguccgacggcugcugguaccccauggagauccgcccccggaagacgcacgagagccaccuggugcgcuccugggucaccgccggggagauccacgccgugcccuucggccucgugagcaugaugaucgccauggaggucgugcugcggaagcgccaggggcccaagcagaugcuggugggcggcgucgugcuccugggggccaugcuggugggccaggucaccugaggacuaguuauaagacugacuagcccgaugggccucccaacgggcccuccuccccuccuugcaccgagauuaaucaaaggcucuuuucagagccaccaaaaaaaaaaaaaaaaaaaaaaaaaaaaaaaaaaaaaaaaaaaaaaaaaaaaaaaaaaaaaaaaaaaaaaaaaaaaaaaaaaaaaaaaaaaaaaaaaaaaa

SEQ ID NO: 2592 - RNA, 1335 nt, Artificial Sequence
  mRNA product Design i-3 (hSL-A100) comprising derived and/or modified sequence from YFV__NC_002031.1__eSS-NS1 (polyprotein: aa758-1130) (opt1)
aggagaaagcuuaccaugagcauguccaugauccuggugggcgucaucaugauguuccucagccugggggugggcgccgaccaggggugcgccaucaacuucggcaagcgcgagcugaagugcggggacggcaucuucaucuuccgggacuccgacgacuggcucaacaaguacagcuacuaccccgaggacccggugaagcuggcguccaucgucaaggccagcuucgaggagggcaagugcgggcugaacuccguggacagccucgagcacgagauguggcgcucccgggccgacgagaucaacgccaucuucgaggagaacgagguggacaucagcgucguggugcaggaccccaagaacgucuaccagcgcggcacccaccccuucucccggauccgcgacgggcugcaguacggcuggaagaccugggggaagaaccugguguucagccccggccggaagaacggcuccuucaucaucgacggcaagagccgcaaggagugcccguucuccaaccggguguggaacagcuuccagaucgaggaguucgggacgggggucuucaccacccgcguguacauggacgccguguucgaguacaccaucgacugcgacggcuccauccucggcgcggccgucaacgggaagaaguccgcccacggcagccccacguucuggauggggagccacgaggugaacggcaccuggaugauccacacccuggaggcccuggacuacaaggagugcgaguggccccucacccacacgaucgggaccagcguggaggaguccgagauguucaugccccggagcaucggcggcccggucuccagccacaaccacauccccggguacaaggugcagaccaacggccccuggaugcaggucccccuggaggugaagcgcgaggcgugcccggggaccuccgugaucaucgacggcaacugcgacgggcggggcaagagcacgcgcuccaccaccgacagcggcaaggugauccccgaguggugcugccgguccugcaccaugccgcccgucagcuuccacggguccgacggcugcugguaccccauggagauccgcccccggaagacgcacgagagccaccuggugcgcuccugggucaccgccugaggacuaguuauaagacugacuagcccgaugggccucccaacgggcccuccuccccuccuugcaccgagauuaaucaaaggcucuuuucagagccaccaaaaaaaaaaaaaaaaaaaaaaaaaaaaaaaaaaaaaaaaaaaaaaaaaaaaaaaaaaaaaaaaaaaaaaaaaaaaaaaaaaaaaaaaaaaaaaaaaaaaa

SEQ ID NO: 2593 - RNA, 1326 nt, Artificial Sequence
  mRNA product Design i-3 (hSL-A100) comprising derived and/or modified sequence from YFV__NC_002031.1__SSIgE-NS1 (polyprotein: aa779-1130) (opt1)
aggagaaagcuuaccauggacuggaccuggauccuguuccucguggccgccgcgacccgcguccacagcgaccaggggugcgccaucaacuucggcaagcgcgagcugaagugcggggacggcaucuucaucuuccgggacuccgacgacuggcucaacaaguacagcuacuaccccgaggacccggugaagcuggcguccaucgucaaggccagcuucgaggagggcaagugcgggcugaacuccguggacagccucgagcacgagauguggcgcucccgggccgacgagaucaacgccaucuucgaggagaacgagguggacaucagcgucguggugcaggaccccaagaacgucuaccagcgcggcacccaccccuucucccggauccgcgacgggcugcaguacggcuggaagaccugggggaagaaccugguguucagccccggccggaagaacggcuccuucaucaucgacggcaagagccgcaaggagugcccguucuccaaccggguguggaacagcuuccagaucgaggaguucgggacgggggucuucaccacccgcguguacauggacgccguguucgaguacaccaucgacugcgacggcuccauccucggcgcggccgucaacgggaagaaguccgcccacggcagccccacguucuggauggggagccacgaggugaacggcaccuggaugauccacacccuggaggcccuggacuacaaggagugcgaguggccccucacccacacgaucgggaccagcguggaggaguccgagauguucaugccccggagcaucggcggcccggucuccagccacaaccacauccccggguacaaggugcagaccaacggccccuggaugcaggucccccuggaggugaagcgcgaggcgugcccggggaccuccgugaucaucgacggcaacugcgacgggcggggcaagagcacgcgcuccaccaccgacagcggcaaggugauccccgaguggugcugccgguccugcaccaugccgcccgucagcuuccacggguccgacggcugcugguaccccauggagauccgcccccggaagacgcacgagagccaccuggugcgcuccugggucaccgccugaggacuaguuauaagacugacuagcccgaugggccucccaacgggcccuccuccccuccuugcaccgagauuaaucaaaggcucuuuucagagccaccaaaaaaaaaaaaaaaaaaaaaaaaaaaaaaaaaaaaaaaaaaaaaaaaaaaaaaaaaaaaaaaaaaaaaaaaaaaaaaaaaaaaaaaaaaaaaaaaaaaaa
